United States Patent Application Publication US 2022/0290142 A1 - sequence listing, part 11

SEQ ID NO: 13580 - DNA, 23361 bp, Homo sapiens
cggtgcccgccgtggacttcggcaacgcgcaggaggcgtaccgcagccggcgaacctgggagctggcgcggagcctgctggtgctgcgcttgtgcgcctggcccgcgctgctggcgcgccacgagcaggtgcgcggggtgcaggcgggggcgcgggggcttctgccggtcccgggagcctttacggagcttcctggcctgaaacgggtgcctcccaagcatctcctggagcaagggaagccaggaagggaggcgtttcctgcagtccctctcggacctcgcaaattttcctatttgtcgatgtctaccaactaaaaacaatggtcgttttcatatttacgatatataccacttgtgggaatacagagttatcacttggaatttaaaatggagtattcttcatgttgagacaagagaatcctggtgtagggctcatagcctggaaccccggaattcaaaccccgggacccagcagcttcccagacacggccactctgagaacactgttggggaaaaatgggaagcccctcaaacgcccagctttgaactcacccatggtagctttaaaaagtgtcagggcttttggtggcggtggtggggggcaacaagcagaacactgttttagccgcatcagcctaggggtactagagatgacggttatctccaggtgaccctgggaagagtttgcaaggttccgctttttggcgccagggtatctggtggtgttgatttctcaggtgagactgtacagaggtcgggggctgcacccctggcctcaacaggaggcgggggaaggcgggggacggtgtcagatgagaagcaccgagccacagttgagcttaggtgaggcctcggcgggtgcgaggtgagggcagggatccacgaactcagagtcagatgctgttggcccgaatcccatggggagcgccaaggtcagcctaggacccgtggtggcgggagtgcggaggatggtggaggaagaaggagctgaactggacagatggagggctctgggagggcattgctgtgtgtgcacacaaggatgtcttaaggtcaagttttggtcatagagagccccggccaaggagacaggagggcgagaagggacatcccaggtagaggaactggcaaggtgagggacggcgatgtggaggctttggggagtgcccacatctaaggggcatcccaaaagaggagccagtgctggtggtgctgcaataggaggaggaggcagcagggcagaaatgccaggggagggagtggccagccacaggtccctgcccagggcaaggacgggcatgctaggtggcagctggggccagtcgtgcagaagccatgcccaccttgtggccgggatggagtggggactaggaaggcaccaggtcaggtttctgtaggcacagccctaagcatggctgggatggggagggggctaggaaggcaccaggtcaggtttctgtaggcacagccctaaggtttcttgtctagattcaagacaagttgttgcacagagaagccagcagagctgggtgtggggtttggtgcccagtctgctgcggggaatgccaggtgctgttccgtgactgtgggaggaaactgttggctccgctgtcccttgggtgccttcttgaggcaagtgccagggctcagggatggtgctgtgagtacctggaagaggcagggcatccagaggtgacctctcccaggctcccctagggtcccacctgtgccctgggaagtccctcagtggggtctgtactgttgtcttgctagtggtcccatgggtgtcggcagcctcagcactggaagaaggcagaggccaggtcctgggcttgtgagctgctcactagaacctggtcctgtgagcgggccagaggggagttccttccctcaccctctgggctgtggggagattccttctgctgagccagcacaggtctgtgaggcacccgggcagtgaggccacatctgccacaggcgtgtcaggttgtagtagctgatctttgagctgctgccttggatggggacagcagtggggcccgcccttgcctgaaagccagacttattgaggagggtttaggaaagtcccaggatttccatgacaacagcactgaggttgggtgtgcgccctcacagaagggacaggacccgtggtgacagtggttccctgagtggggggaggggagagaaccggctctaccagtgttactctgcacacatttggttgagtctttcacagggggtacaagtgtatgtgttactggtgcaggtttctaaatcctcgaaggatctcctcacctgaagaagatgtggggctgccctggtctcaggtagtgccatgcggggacatcagtgacaccaggatggtgttaaagtggttgctttgctgtggagtcagctttaaaattacaagccctaggctcatgcctaggcatggtggctcatgcctgtaattctagcacttaaggaggtcaaggcaggaggatcatttaaggctaggagttcaagaccagcctgagcaacatcgtgaaaccctgtctctacaaaatatttttaaaagttagctggggccaggtgcggtggctcatgcctgtcatcccagcactttgggtggccgaggcgggtggatcacctgaagtcaggagtttgagaccagcctggccaacatggagaaaccccatctctactaaaaatataaaaattagctgggcatggtggtgtgcgcctgtaatctctgctacttgggaggctgaggcgggagaatcgcttgaacctgggaggtggaggttgcagtgagccgagattgtgctactgcactccagcctgggcaacaagagcaaaactctgcctcaaaaaaaagaaaaaataaaagttagctgagtgtggtggtgcatgcctgtagtcccaactactctggaggccgagataggagtgtcgcttgagcccaggagtgagaccctgcctctaaaaataaataaataaaaaacttgccagccctgcctgtgtgcttctgcagccctgtgcagggagcttccaccctcagcccgggcccagtcccccagccccccatctttgtgaataagcatccctggagtcagtgcagcctgggctcccgccccttcatttagtgctggccgtgcggaggcgagcagttaggtagagggagactgcgtggccccgtgcggcagtcgacagttgcccaccctccctcctgttgttttctgatggttctctcagagcggatgtggataagcccagtgatggtgttcaggtccccagttctgccccgcctgccacttgggtgatctttgatatgtttcagacccatcctgttctcccaactatccctgggtgctgccagcaggaatgaggcctggctcaggctcagtgggagacggagaacatgtcagcctgttcattttccagtttctaatcctcttgataaaagaacaaaatgccttaaagtcagattctgcttggaggctgcaggaaggcaggggtgagtgcctgggaaaccctggtccttggggctgccccatggcgtgcccaggggtgatggtcaggaggcgtctccatggggcaccaatgttcagggtaaggctgtggggctatgtctgcctgtgggcaggcgtgtgggtgctcagggctggcttgggtgtaagtgtttgactcgctaatggttttgcttagactagaagttgttcctgaaactacggtctcaagagatgctccccacataaaaggagttctagtatccattgggtttgagaaaccccaggctcttcctgtgttggggctgagtcggcaggggcagcagacacaacgcggaggtgtgcttctgagcatcacactcggccctcctctccaagtagcctctcgttgtccctgtcctttctgccctggctgtcccccgtgctggagctcccacagttgtccatgccatctcctcgccttggcaagccccactcctggatctgggttagtaaacacccctgccctaccctgcaggcactgccccatccccctgtcctgagtcataggcagagtccctccttcccctttggggttcctttaccaccaggatgtgagatcctggtcggtttcctttggttgtttccagtctataaaaggtgcttggtgcatggcagcttgggacatctgaatgagcgacgtggtgaaatatgattggaggagacagacagttcccgggcagcatctgtcagagtggctggtcagccccagatgaccctgcagagcgcatgggtcctggggtgggagtcatctcacaggcccctgtggactgtcatctagctcattgtccttgttgccagggcatgcctccctccagctgggcgcagactcagcctgagtttcacacgtttgttatttagcatccattcgggggctggcctcatgccagtcacactgtttaagggacttgggataagagggaacaaaacattgaaaaatctgggcactcaagtactagaaagtcaagttagatcctcctcttccgcagcagaactaccaaggtgtggatacagaggatggtctcaaaatgccggctgtcatccccagggaggctggccattctcctttttatccaccaagcagtggtcaggcacccactgtgtgctgctggagtgactcatgggtggggccctgaaggggcagagtccaggtgggaacagtgtcctcaggccaagcaggcagcacctcctgtggtctctctgccctggatgggaactggagtgatggacagggtggagaagcaagcggctttagctggtcttcaccatgaaactgaccctgaaagcccagtcgccaagagaccatatcgaggccccatggctggggtgaagtgtggtcggggatgagcagcggtgccttgctgggaaaggagagttcaggcagcccaggacagcggcttccctttgcctttcagctgctgtatgtttccaggaaacttctaggacagaggctattcaacaagctcatgaagatgaccttctatgggcattttgtagccggggaggaccaggagtccatccagcccctgcttcggcactacagggccttcggtgtcagcgccatcctggactatggagtggaggaggacctgagccccgaggaggcagagcacaaggagatggagtaaggcctgcccggtgtctgcgggctttctgatcatgaccctggagcacccagtgggagcaggtgggatgtatccagctgctgggcttcagcctcagctgggcagaggccaaggctaggagagcttggtcagcccaactaccgatgaccctcctgggctctgcctggagttcttgcatttttgtttcatgcggtggacagctctgggctttcatgggaggcctggtgtgcgtgaggcctgaggaagcagagtacagaatggcccttggccctatctagtccaccgcctggaggagcacaggcaccagcatatgaaccaagcactctgcaaagaatggttggtctcgcctggatctcacatgagccagggactgctccaggaagtggagggaaacgtggtcttgttgttctgtcctgatgccctgcccaggagggcgggtcagggtggtaccaactgccctctacactcactgcccagggaaggggccttgtatcagcttagtggcctccaggagctgactccaggccggcctgctacactgctcctggcttcaattcccttctccactgacaatggggcaggggccaggcctgggaggttccacaactgcagggcaggctgaggccaggcaagggtcgggcagtgggacctgcctgcgggtcaggaatccctgcaaaagagaggctgtagcagagcctcctccatcaggtcagcaagtttgtgtaaacagccaggtagcacagactctcagtcgggccacaccctccctgccacaacggcttcactctgcctcagtagggccatagtaattagaatttcatataattttcttgtgtcacaaaatattattcttgttttgatttctttcaaccagtttttttaaagtagggtcttgctctgttgcccaggctagagtgcagtggtgccattgttcactgcagccaaccttctgggctcaagtgatcctcccatctgagccccctaagtagctgggaccacaggcacgcaccaccatacctggctaagttttaatttttttttgtaaagatgggatctccctatgtcttcctatgtatttgggtcccctgcaccctgacagcagccgggcctgacccacataaggcttgggacagtccctctgtggacctggtcaggccttggtggttgttcctgcccctcccctggtggctggcctgggaaggggagggaaaggcagtcacatgaggcctccagccctgggaacggaatgtctgaggcttgcctcagcatgtcggctgccagctgcctggagaggattggccaggggagcccagcccctgccttgcgattggctgttttgaaggtggggtactacagccccagcaccccactgtgttcctagcaggccccgtgggccttgcagctgcctgagctcttggctgcagcctttgctgagctgcctgttgaataaccaatggcctgtgtgttctcagaaggagtctgggtggggacttggtttcacaatgggattttcctctcaggcgcctctggtatgaaaagactcctttcccagggtggtcctgcctggcttcctccctgccctgcaggctgagtgtctggaggtggactggcctgcactctgccagggggctgggcacctgtgtccttaggagcttgagtcctttgccctgcaagggattcacctgtcttgctgctggtggctgctgtctgcaggggtcctgctccagctctgggaagtgaacagggttccctcctgtcctcacaggggtgcatgctgaggacacctaccgagctcagctgctttgtgctttcagaggggcctgagccatgggggtagggctgggtctgcaagcactggtctgatgtccacactgcagcatggcctgcttggccaggagtgaccagtcacgcagaccctagtgcagggaactgcttagagatctgccttcctaacctaccctcctgtcacaagggccatgggctctactctggggagagacactgaggccaccgccccaaattaaggccatggcaagtggtgctggccgtgagaggcccagggaggatggaggcgtctgagtgcatggcaaagtgagtcccagcagtgctcccgagaaagaaagaggaggtgggagcctggaggtgcaggagggcaatgcccacccggggggggggtggaccatgcttcccagaggccagggccccacccaaccccaggagaggagtcccagggatccccgaagcaggctgagggcttggggatggggaaggggccaaggcatcttcctgatgattgggctgtgagggaacacctagggggtggatgggggcattggtctggctgtgcaggcccagggctggctggaggcaggatatgtgtgcagtgagtgtcctgagcgaggggctggggaggcagagggttggggagctggggaggggggtacaggtaggaagcggcttgccaggcttccctccaggagagagttggacaagggcggggtgtggacccccatgctctgcttgtttcaataggcatcacgtccccagggacagccacccagagctgaggtggaggctgagggggtggtcagggtcttcctgctgtctctgaagaccccctggggacacgtgcttgtcctcctctgccctatgtccccttgtcgctcttccctcctctgttgtcccaggtcgtgcccatgtgtgcgatcatgtgcccttcaacagactatgccctgggcatgatgaggggtgggactgggggagcacgaggcaggtcctggctttaaggaggcattgggatgtggtccccaccctgatcagggccccacatccactggttcacccttcctcctctaacaccccacagctgccagtgccatgtgcccccctcttccctgtggtgccttgagccaggacgtggcaacgtcccaggtggcgaaagccagatttcctgtgtggcacccgcagttctgaatcagctgctcccagggtgctttcttcctcttctccagtggaaataggacccctgacctgcctgggaaccaccatttgtgtctccttgtgacttatccatgatgcctgttggagagtgtggccctgtccttgctgcgtagccatccactctgagacctggctgcccctctggccactgcacgtgctgtgtggtcatcttggccactgcttggctgtgtcagcctggtctgtgctctggaagttcacggagaggagcagcggtagcctatggtgttctgcctctgagtgtgtcagagcaggagagggagcagccctggcttccccagcctctcctgccaggcccacctcagaggatgaacacagcagctgtgggaatgctgagcgggaactcatctgcctggggacctgtcagataatgatcctgtttcatgaaggtgagctgcctcacaggcagacacctgtgtggttaagtcccgtgttatccaaactgtgggctgtgtggtttcaggatgggaccttctcttcagggtcatggaggcccctgaggccctgtccccactgtctgctgttacttgccatgagggtttctgccctgggcagggccctggctgccaccccggccttaacatagacagtgagtcccccttggggatggcttttcctggctgtacctaagccttggcgtgaaggtcttagggctgatctcatgactggtcttgaggtgcccaagccaggggcccaggagctccctgtctcaggcaggggttcacgtgctgcctgcctgttccctagtcacatggtgacattccaccctcttctgtcacatctctgtcagcataaggtggccagagcatatctgcctgccagctcccatcactgggctgcagcctcaggggccctggcagcacatgtggagtccctggcccatgtggggctgcccaggagtgggtgggagggaaggcctcctggcgggggctcctggcccagggcttgctccttgagcagccaggtggaaagtgggcagctgaggccccttgacatggaggcctctgggatgcggctcactgaccactgctctgcctttccccttcccggcatctgagggggaccctctcctttcctgtgagtgtgggcagagctgcccctgagggtccgagcgcctctggggagcttcaggaaggctctgggtgctgttggtcatgcagctgagctctctccgtggtcactgacttgatcaggtttgaatataaagtcaggtgaccctcagagctgctccgggggccagggagaccatggtcgctttgtcacagcagacttaacggccgcagcaactcttgctagcctggatgacacagcactgaaaccaagtgccagaagcagattgtggctgtggggaggaggaggaagaagaggaggctctggcaggggtgcagggctggtgggggaggggagccaggtaccctagagaagggaggggccagggggaatgggggtgctggccaggcggggatggagaggcttctgcaggaaggacaggggcttggctgagcagagtgtggccagcctagcgggggacagcctgcatcctggcctcactggtcttgaggtgcccaagccaggggcccaggactttgggcattactaggaaatgatgggaaccctgggtggggtggcgtgaaacaagatgagatggtaagatctgctttcactttaaaggaacatttctggttgttgcttggaaaagaagtgtcggggcaagaatgctacaggagggccggcctggaggacagggcgggactgcagggctggctgtgcgggggcaggagcctgtgcttgcatcagagctgcctgggagaccctggctctggggtggaggcctgagtaagggggcctcgctggggatttggggacctctgtgtgctggtgccttcccgcctccgttcctctcagccctgactggctctgtcttggaaccaggtaactacctttatttgagaacctgctgcaagccctgggctgttctgagagctcaggaatatcgttctgatttctccacccacaaggagccccgggcttcctgagcccttgggacacagcagccccataaactgctgcccctcccaggcccaagtgttccaccccaggctaggggtggggctggggctgcaccttggaatctaccctccaccggggttgtggtggggccctccgtgcagcctcagtgggaacgtgcctgtcacctgaggctcaggtggcgtgaccctgacctttgctctccccctccttcccacaggtcctgcacctcagctgcggagagggatggcagtggtgagtgagaggctgccgcgcaggaacagactccctcccgactccgcacaccccttggtggctcaggagagtctaggctggggcacaagtgggccttggggtgacgtcggagcccgggctcctccctatgtccagggcacctgccctgtcgctctgggctctgacatactcgcaagtgtctggggagacgccctgctcctttttcatggcctcctggtggacctaggcctttgttaaggagactgccgtcctggcctcatgaggaggcttagccagggggatgcagcactccaggtggaagagccgcggtgtagacaggagggtgggcttggggatgggaaccatggggcagtgcagtgccagggccaggctggcaaggccactatgcttggagccctcctgagggcaggggccctgggctattggtgtgtgggtgctgggggtgggtgtttggagctgtgctcaggccgtgcattcgctattccaggcacgaataagcgggacaagcaataccaggcccactgggccttcggggaccgcaggaatggtgtcatcagtgcccgcacctacttctacgccaatgaggccaagtgcgacagccacatggagacattcttgcgctgcatcgaagcctcaggtggggccccctctttgctggctatacccctgccatgtcccagcctgagcggacccctgggctcatggaggtgccggtgggtgaacactaagctggggcaggagccagagggctgggttctgaccacacttgggtccctcactgttcagccccttcctgaggggccccactgcctcccagaaggcatctcctctcctgccccagctccctgttccctgatcccgcctcatgccccccacccttctccctggctcagggccaggatcgggagctgcaggaagttggtccatgtcagctgccgagccacacttagcccagggtggaggttccattcagggagctggtgccgcatcttctgtccttccctgacacagcctctgggggccagcggtgggggcagcaggtgtttccagggatagagaagccagaggtcagcaaggcccaatgtccttcagtgttagaaacatccgacctgcacagccccatgctggccccagcagccctccgtcaggggcagcgggtcccaggcctgtttatgtttttgtttgtttgcttcaaatgagactggatcttgctctgtcacccaggctggagtgctcacgcctctaatcccagcaatttgggaggccaaggcgggtggattgcctgagctcagttcaagaccagcctgggcaacatggtgaaactccgtctccactaaaatacaaaaaattagccgggcgtggcagcaggcgcttgtaatcccagctacttgggaggctgagacaggagaatcacttgaatccaggaggcggaggttgcagtgagccaagattgcgccactgcactccagcctgggcgacagagtgagactccatctcaaaaaaaaaaaaaaaaaatgaggtctcactatgttgccctggttggcctggaactcctgggctcaagtgatccctccaccttggcctcccaaagtgctgggattacaggcacacactaccacacccagctaattttcatattttttgtagagatggtgtttcaccatgttgcccaggctggtctcaaactcctggcctcaagcgaaccttacactttggcctcccaaagtgctgggattataggtgcatgccgctgcacctggcacttctgagcagtgcttggaagccgcctcctgatgggggctgagggtcagagtggccagctgaatgctgggccatcagggtgaggggcgtcttctcctcgtccattgcctgttctcccagggcaggtggaaggggaaggccctgcattggggtggcgtgaaacaagatgagatggtaagatctgctttcactttaaaggaacatttctggttgttgcttggaaagaagtgtcaggggcaagaatgctgcaggagggctggcctggaggacagggtgggactgcgggctggctgcacgggggcaggagcctgcgcttgcgtcagaggttcctgagagactcggtctctggggcagaggcctgagcaaggggacctcgctggggtgtctctgtcttagccacgctcggtgtttctgggtcctgtgacccacgtgtgagcagcctgtggtgctggtggcacagggaaggaaaccgaggcagggagcctgtgggggctgcttggcaggggacaggcagctcctgtgcccactgctgtcccacacctgcatggaaacagaaaccccgccacggagccccctcccatctccacagggcctctagagcgccatgtgcaaggacttcatgggcggggtggggtggggtcaggagcctgctgtgggctggccaggccctggccctccctgtcgcaccctgcgctgcctccatgcacctctcagggctgtcatggcttttcctgtggcttctgacaggtagagtcagcgatgacggcttcatagccattaagctcacagcactggggagaccccagtttctggtaagtgctagaaccttccacctgcagagtctggtgctgtgcgagatctcagggcagctgtgggcatccaccaaaaacacaggtgcccatgccttagaggcctgagctggccacaggggctgtgtgggggactggggtgggcaggggcgtgtgcagatggcattcaggcctgcgtttgcagctgcagttctcagaggtgctggccaagtggaggtgcttctttcaccaaatggctgtggagcaagggcaggcgggcctggctgccatggacaccaagctggaggtggcggtgctgcaggtggggcagccttccccttccccactcctgtggcttgtgagggggtgggcaccgtggggtcacacggggcatggtgggcagtggtcggaggtggttttgggaactcacccagggcatgtggctcactctgcagctgctggggttggcctggtggggaggaggaggtcagagggactctgaacagagaggggagatgctggcaggagggctggagacccagccctgcagggcgtgggcgtgcatcagcagcggggtgggaatagacctgtctatgcagtagaaacaaaccagacatggatcctgttcttactaacgatgtaataaagccagaaacagcaccagaggccaatgggtggggggaaggataaaatatgagtgaatggggctgatccaggccttctcacttctcaaggaaagtgtcgcaaagttgggcatcgcatccagggctgagattgaggactggttcacggcagagaccctgggagtgtctgggtgagagcagcccccaggctgagaggacacgagcatcagccatggttccagccaagccccagtgacgtctcccagtcctggctgccctgcctgagagggtgggccctgggatgacagtgctgaaggaactgcttttcacacagcaggacttgatggcttcaggagtccctgaggctggggctgggctgggcaggggagacacagggccagcacagaccccatagagggctctttatagaattatctgggtccagagcaaaggtggcactctcagccctccctggagtccacgccggcaggtgaaggatcagagccccatgccccatccttggagccaggggctgggacccagatcaccaggagcctccagttgaagtggggaggtgactggggtggtgcagtagtgagccatcccctcacacactgccagccttgcccactgtgtcctccctggccgcccggagctgtgtccgcctcctgcctggctgcctgtgctcggcccctccacaagcccaaaacagcctagggtactcagtgttttcagagccgcctagatgcaggactgtttgtgttttggttttaaatttatttaattaatttattttttatagagaccaggtctcaccatgttgcccaggctggtttcaaacccctgggctcaagtgacctgcccgccgcagcccccaaagtgctgggattataagtttgagcccccgcatgccactggttttaaatttttaaacagaaaacaatatttatatttcctctgtcttttaaaactgaacaccgaggtgggttttgtggtgggtggtgaacggacaggtttgggcctcgatcccccacccgaccctagcacccacaggtgggggtgccccctctgctgatgcgcctcctccctcagcaccatggacctgctggactggagcagcctcatcgacagcaggaccaagctgtccaagcacttggtagtccccaacgcacaggtaacacctccgctcctcagtgaggcccagctcagcagggcgctgcgctaagaagggaattcagcctgccacgtgtgtctcttgttgcctaccctgggaacttaacatgaccaaaatcactgcacactatggccccacagaccccctgtggtccagggggaagaagacaagcccactagtgtccacagagtgcttggcgggacagagacccacgcggagccttaagacaccacaaggagagggggtctgggggccttccccaagtcatctgtcttgtgcatcaggtcaccccaaacttcagaggcctgaaacggcagcagccactctgcttctgcctcatggttctggggttgacagggctcagctgggcagtcctcccctggggtctcctgggtagctgtactcacagagtggtggcgctgggacctgggggaggcacccattcacatgtctgggagttggtgctggctgtggcttgggctttttcccaacatggcagctgggctctaagggccagtgtcacctgagacgtgagagccaggcagaagctgggtgaccttttcctgcctcgcctcagaagtcacacggtgtcttttctggcaagttctgtttgttagaagcatgtcaccaggccagcctgtatacagcggggagaggaatgagactcatctgcctgtgggaggggggcccaggacctggcagactgcttgaaaccacagcttaaactgggattcaaagaaagaacagaagcaccttcagaaaacatcctgcagaggcagctttccatgacacatctagccccagtccactaagggcccagcctcaaacttagagcccccgacccagagcctcggggcgcagtgcgtacagtgtggctgtgcaccaaggccaccagctgttggagactttagcatggtgtagcaagggatagagtggtactgtttgtgcccagtgaggcaaggctgctggggccagcaaaggggtgagcgggaggccctgcgggatgggtccccacggcctctgagcaccagcaacttgaaggcctcatcctggtggttgccctggtccctggctacgtgtcagcacgtgctgcacaactgccctgtctgcctgtagccaggggtcttcctcctgggccctctgcctgctccgggtggagcccttctgtttgacgattgggtgatcagtgttcacttgttcaatgtcacatgggagttgcagggggctctcccacaacggtggggcctctgtgggaactggggagtacacacttcggagtgcaggcctggactgagcctggggcccactgacatgggcactgagctccctcgtggtacccctaggccccgcatagggcagtgcactggctgcgttggaggttcaggggcactgtgctgcttgtccaggtggccctccctcccagccctgcacagacgggtgagagggttcctgtgggctgggaatactgagagaggtttagcctgggcctcagggtggcactttcccgcccttgctgtggcctgaccgcgtgttgcacccccagacaggacagctggagcccctgctgtcccggttcactgaggaggaggagctacagatgaccaggatgctacagcggatggatgtcctggccaaggtgagctgtcccgctcgggcagagggtacctgggactcgtggagaagagggcacctgcctcacttgagcaacagttgctcccactctcccaccccctgcgcctctcagaaagccacagagatgggcgtgcggctgatggtggatgccgagcagacctacttccagccggccatcagccgcctgacgctggagatgcagcggaagttcaatgtggagaagccgctcatcttcaacacataccagtgctacctcaaggcaagcccccgctcagcccctccctgcctgccctggggcttggagaccccacaggaggggctcctctcatctgagctccctggcatttggctggttttacactcagcacccaccagggagctcatgggatggaggagggagtgggccgtgcccccaaggggttgttggggtcttctgcagcacagctcacccagcgggccccagggtccaggaaagagccccttaggtggtggccacagccaggcctgcagaggaggctgaggccagggtgactgcctcagagtagcaagaaagacccgctgcccgcaacctctcccctggttctcagaaccagccaagagtgtctaaggagcaggaggaagacaacaatctttatgagggtccactagatgtacccgacaccccaaacttggaaggtgtcacatgaccatttcctccagcgtgttttcagttcagcgcccctaagaacctcctgaaagctttgggccctccccggaaagactcacccaggatgtcacatgtattcagggagcccaccctagcctttgggccccaaactgctcagggatgttagcaggtccagagctctcaggggtgagccggatgcccagaggacacagggtggcatggggaggggtccaggcaggagcatgcagtatgcacccctcccggtcggcctgggagtctggagcacatgatggctgctggcgcctgggctgcacccacagggccgtccacaggccacacaggaagttgcagacgtccccactgccattgctccttggggacagaggttggaggcccatcctcacccacacctgctccaggtgccctgagctgcacctccccaggcagctgctgcccagccctggtgactgcacctgggcccaggaaggccccatcctgctgtcacttgggcttgcccaggctccctgtgacttttggccctggccccacaggatgcctatgacaatgtgaccctggacgtggagctggctcgccgtgagggctggtgttttggggccaagctggtgcggggcgcatacctggcccaggagcgagcccgtgcggcagagatcggctatgaggaccccatcaaccccacgtacgaggccaccaacgccatgtaccacaggtgcgcagctctcccacccctctgtcttctcagggcagggcgccaagaaaccaggcctgagggagaggcttggagactgaacttgtcagccacatgtgtccccaggtcagaactggtatttcctcagcttttatgtcatgtgttactttttcaaaagcattaaggttattcttttataaatatagaaaagcctattgaacaaagcaaaattggccacagttccctgagcttgctcctgcagacacttagatccagagatgtgcatgaacacccggtcctccccaccctgcaggctcagcctgtttgcttttcagttcacacagtgggatcgcccatcagctgttctgcacctgcttttactgctctagtttcttggtgatcttttcatgtagcacaggctggccaaccatgggcttttcctcttagaggcgtgtgtgcatgctgcaaattcagagagaccccaagtgtctcctggttggctccagctcccctcctgcagccgctgtgcatgtcgtgccacagcgcacacatctccgccattgttttttgcgttgtagcgtgtcctctgcccgatgtgtttttcatttcgcgttccatctgggtcctcttgtgtgggcttgcagagtggtgctgtcaacagccagcatggagtgcccggggctatgtgtccagcatctttgatcttattggtttttagtctggttattgtaatggactcgctggacataccgtcaccctctgtggtacacacgggccgtcaggggttttgtgtctgaggatgcagctgtcctaggttgctggaaatggaattgctgggtcagagagaacgtgcgtgtggtcaagcctgctgagtgacctcgctgcaggagggccgtactgctcgggcttcctggtgcaccgggatgcccacccccactgtgccctacagggacctgcttcccttttatttccttgcagggccaggggtgcactgtacgatccctccccagaagcaaagctgtgtctgtcatgaggctcatgggcatgtttgggctggtccccagagtcacagcacgtttgatgcagggactctgcccccacagctggttctgcgtgaattgtctggtcccagacatcgcttttgcttggttgctggtctttctttttcatgaggtgctgggaggggcagatgctgctcctgttcctcctgatcctgtggatacccttggaaagagccagctcaatggatggatctgggtctgccctcggcctcctctctgtgcagctggtaatgagaggtgcaggcagccacaggcctggaactgggctcacatggcactctccacaggtgcctggactacgtgttggaggagctgaagcacaacgccaaggccaaggtgatggtggcctcccacaatgaggacacagtgcgctttgcactgcgcaggtaggtgtgccccaccctgcaccgaaaccccaacctgagccgttgtctcctccggctggggagaggtggcagcagcgcagagctcagggtgggcagagcgacctgctgggtggtcgggcatttgtggggaaaggctggtgaaatgagctggagggtggcttcagtgggcaggcccaggcccgctggcgttctggacatcggactgtgagagcacaatggctttttgcagttacgttggtttttaaaattaacttttttctttttttgagatagaatctcgctctgtcacctatgctggagtgcagtggcgtggtctcggctcactgcaacctccgcttcccaagttcaagcaattcttcatgcctcagcctcccaagtagctgggattacaggcatgtgccaccacgcctggctaatgttttgtatttttagcagagacagggtttcaccgtgttggccagactggtctcaaactcctggcctcaagtgatcctcccttcttggcctcccaaagtgctgggattacaagcatcagccactgtacccagacttttaaaaattaacatctgacttattaaacttcacaattaaaaaactaaatttcatcagggtattcggatggctcctgaaaggtacaaatgcagtgttggaggccagtccctcaggaggcctccacagtgccacctcattaatacgcccttaacattttaactacatctggaatgtaacggtttgttttctctttaaacatttgtcccatggagcacaacttcggtagaattctaacaagtcaaatgcagaagttaggtgaagtcagttcttggatactcctgtactgtcaccctggtcttatctcatgccttagtccaagctatgcacacaatggggtcctaggtccccctcccctcccagattccgccttcccagggatgggaccccctagaaccctcgggggcctgggcagtggcctcgctggctctcgccttcctaggagctgagcaggagctccactctcagcagggcagggtgccccagatccagggcttgtggcacgagggggctccccaagaagctgtgaagccacagggccaggcttggggccagggctgcagccaacaggacacatcctggtgctgctcgggagctgactcacggctctgaaatcattcagtgatgtccacattcagcctttgtttacgatgctgctactttttcatggcctgaaattgcagcacacccatttttgtgccctgatcctctgctaattgtcatagatgtgtcggtgatgggacagactcactttctccacacgcacaggcctggtggccagcactgcccagcactcgggagctggtgggggttcctctcagcttgtaatcaggactcccagcctctgggtggactctcaatgctggtggactcacagcctgactagacacatcaccatccaactccgaaaggacagcctgccctcagcagggcttcctctctccagcttccgcccggcacctgtctgtccctactatcttgctgtggcagtggcttccccagtggacacagcttccccctcccctgagtggcagccgggctctctcctcttggccccaagggccctgtgccaggctcccccagtaccacgctcacatccctgcctgagaggctggacccctgcaggcttcagctctgcccctgctgtgggtggttggggagctctggggagctggggtcccctcccatgggtaagtggttctagactatggcagctgctctgtcctgtgctgggcccagactgccacaccacccaccctcaaacaatcggagttggctttggccaaggaacaaaccagccccaaacttagaggctggaacagtggcatgttctgtaggccaggggtgggctggctcagctgatgcttctgctgctggctgtgcctgtgtccctcctgcgtctgtgatctggggccggtggggcctaatgagctcattcatggctggggcagtaaaggagactgcatcccgggtccagcgtcccacaggccagcccaggcttgagcacgtggtgggctcaggcttccagaaggcctggagagggcaagcctctgcttgtgtcacctttggtacctccctgctggccaaagtgcctcacgaggccaagcccagatgccaggtggagtgagccactgtcctgtgctgggaggagccgcagtcacatggcagaggctgtgcacaccagcaggggagggggcagccagcagtggcacccggctctcgggttcatgtcctggggttgaggaagacacaagatggaagccagggcgatgtggcagagatgggtgcctgctttagactgggtggtcccgggtgatgcgtgagcagcaggcggaactcaccccagggtggggaccccagtgctttgcagaccagcgaagtcgggatacctggatatagtaagctggagatgaaacttgagaactgccactgcgtggatatttcagaccctgagaatctttgtaagacgctatacggggtggtgtgaagacaggacagagtggaggccccaccccagtatctgagcagtgctaatagatatataatgcaagccacatctgtaatttaaaatttagtagctacgttaaaggaaaaagataaaatgaatttcaagaataattttaattaacccaaaatattcaaaatattacttcaaattgtattccagttgcttttagaaaagcaacgcggcatcgtgcattatttttctacaaagtctcctaaatcccgtgtgtatttgacatttgcaacacatctcgattcagagcagccgccttccgaggactcgggggctggtggcagctgtgtgggacacagcagctgtggggatggggcagggcagcagcccacagagggcgagggcaggggccggagaccagtcataccacagaaccctggaggggcttgaggaagggatggcaggagagctgaggagcttctctgccctgtggggcaggctgctgggtgggtcagggcccgaggaagggctgcacctccaagaagggagctagaggagaggtgagagaggagaggggagggaaagcaggtgggaggccttgttggccaagggctgaggcctccccagggagacgagtagggcagcccagcagagtcctgctgggaagaggcctcactggggcagggccaggcagagcccataccccagccccaccttgcaggggatgaagtctggagagtgcagatggggcacctgggatggcaggacaggctcagagctgggacaggagccctgtatccctgcactggggacagtgtcctggaactggccctcagttcctggcttcacctgcacaggatggaggagctgggcctgcatcctgctgaccaccgggtgtactttggacagctgctaggcatgtgtgaccagatcagcttcccgctgggtgagtggggccctccctggtgcgatggggtacggtgctgggcctgggcctcatggtgtatctgcccccatgcaggccaggccggctaccccgtgtacaagtacgtgccctatggccccgtgatggaggtgctgccctacttgtcccgccgtgccctggagaacagcagcctcatgaagggcacccatcgggagcggcagctgctgtggctggagctcttgaggcggctccgaactggcaacctcttccatcgccctgcctagcacccgccagcacacccttagcctccagcaccccccgcccccgcccaggccatcaccacagctgcagccaaccccatcctcacacagattcaccttttttcaccccacacttgcagagctgctggaggtgaggtcaggtgcctcccagccctgcccagagtatgggcactcaggtgtgggccgaacctgatacctgcctgggacagccactggaaacttttgggaactctcctcgaatgtgtgggcccaaggcccccacctctgtgacccccatgtccttggacctagaggattgtccaccttctgccaaggccagcccacacagcccgagccccttggggagcagtggccgggctggggaggcctgcctggtcaataaaccactgttcctgc

SEQ ID NO: 13581 - DNA, 4676 bp, Homo sapiens
cggtgcccgccgtggacttcggcaacgcgcaggaggcgtaccgcagccggcgaacctgggagctggcgcggagcctgctggtgctgcgcttgtgcgcctggcccgcgctgctggcgcgccacgagcagctgctgtatgtttccaggaaacttctaggacagaggctattcaacaagctcatgaagatgaccttctatgggcattttgtagccggggaggaccaggagtccatccagcccctgcttcggcactacagggccttcggtgtcagcgccatcctggactatggagtggaggaggacctgagccccgaggaggcagagcacaaggagatggagtcctgcacctcagctgcggagagggatggcagtggcacgaataagcgggacaagcaataccaggcccactgggccttcggggaccgcaggaatggtgtcatcagtgcccgcacctacttctacgccaatgaggccaagtgcgacagccacatggagacattcttgcgctgcatcgaagcctcaggtagagtcagcgatgacggcttcatagccattaagctcacagcactggggagaccccagtttctggtaagtgctagaaccttccacctgcagagtctggtgctgtgcgagatctcagggcagctgtgggcatccaccaaaaacacaggtgcccatgccttagaggcctgagctggccacaggggctgtgtgggggactggggtgggcaggggcgtgtgcagatggcattcaggcctgcgtttgcagctgcagttctcagaggtgctggccaagtggaggtgcttctttcaccaaatggctgtggagcaagggcaggcgggcctggctgccatggacaccaagctggaggtggcggtgctgcaggaaagtgtcgcaaagttgggcatcgcatccagggctgagattgaggactggttcacggcagagaccctgggagtgtctgggtgagagcagcccccaggctgagaggacacgagcatcagccatggttccagccaagccccagtgacgtctcccagtcctggctgccctgcctgagagggtgggccctgggatgacagtgctgaaggaactgcttttcacacagcaggacttgatggcttcaggagtccctgaggctggggctgggctgggcaggggagacacagggccagcacagaccccatagagggctctttatagaattatctgggtccagagcaaaggtggcactctcagccctccctggagtccacgccggcaggtgaaggatcagagccccatgccccatccttggagccaggggctgggacccagatcaccaggagcctccagttgaagtggggaggtgactggggtggtgcagtagtgagccatcccctcacacactgccagccttgcccactgtgtcctccctggccgcccggagctgtgtccgcctcctgcctggctgcctgtgctcggcccctccacaagcccaaaacagcctagggtactcagtgttttcagagccgcctagatgcaggactgtttgtgttttggttttaaatttatttaattaatttattttttatagagaccaggtctcaccatgttgcccaggctggtttcaaacccctgggctcaagtgacctgcccgccgcagcccccaaagtgctgggattataagtttgagcccccgcatgccactggttttaaatttttaaacagaaaacaatatttatatttcctctgtcttttaaaactgaacaccgaggtgggttttgtggtgggtggtgaacggacaggtttgggcctcgatcccccacccgaccctagcacccacaggtgggggtgccccctctgctgatgcgcctcctccctcagcaccatggacctgctggactggagcagcctcatcgacagcaggaccaagctgtccaagcacttggtagtccccaacgcacaggtaacacctccgctcctcagtgaggcccagctcagcagggcgctgcgctaagaagggaattcagcctgccacgtgtgtctcttgttgcctaccctgggaacttaacatgaccaaaatcactgcacactatggccccacagaccccctgtggtccagggggaagaagacaagcccactagtgtccacagagtgcttggcgggacagagacccacgcggagccttaagacaccacaaggagagggggtctgggggccttccccaagtcatctgtcttgtgcatcaggtcaccccaaacttcagaggcctgaaacggcagcagccactctgcttctgcctcatggttctggggttgacagggctcagctgggcagtcctcccctggggtctcctgggtagctgtactcacagagtggtggcgctgggacctgggggaggcacccattcacatgtctgggagttggtgctggctgtggcttgggctttttcccaacatggcagctgggctctaagggccagtgtcacctgagacgtgagagccaggcagaagctgggtgaccttttcctgcctcgcctcagaagtcacacggtgtcttttctggcaagttctgtttgttagaagcatgtcaccaggccagcctgtatacagcggggagaggaatgagactcatctgcctgtgggaggggggcccaggacctggcagactgcttgaaaccacagcttaaactgggattcaaagaaagaacagaagcaccttcagaaaacatcctgcagaggcagctttccatgacacatctagccccagtccactaagggcccagcctcaaacttagagcccccgacccagagcctcggggcgcagtgcgtacagtgtggctgtgcaccaaggccaccagctgttggagactttagcatggtgtagcaagggatagagtggtactgtttgtgcccagtgaggcaaggctgctggggccagcaaaggggtgagcgggaggccctgcgggatgggtccccacggcctctgagcaccagcaacttgaaggcctcatcctggtggttgccctggtccctggctacgtgtcagcacgtgctgcacaactgccctgtctgcctgtagccaggggtcttcctcctgggccctctgcctgctccgggtggagcccttctgtttgacgattgggtgatcagtgttcacttgttcaatgtcacatgggagttgcagggggctctcccacaacggtggggcctctgtgggaactggggagtacacacttcggagtgcaggcctggactgagcctggggcccactgacatgggcactgagctccctcgtggtacccctaggccccgcatagggcagtgcactggctgcgttggaggttcaggggcactgtgctgcttgtccaggtggccctccctcccagccctgcacagacgggtgagagggttcctgtgggctgggaatactgagagaggtttagcctgggcctcagggtggcactttcccgcccttgctgtggcctgaccgcgtgttgcacccccagacaggacagctggagcccctgctgtcccggttcactgaggaggaggagctacagatgaccaggatgctacagcggatggatgtcctggccaagaaagccacagagatgggcgtgcggctgatggtggatgccgagcagacctacttccagccggccatcagccgcctgacgctggagatgcagcggaagttcaatgtggagaagccgctcatcttcaacacataccagtgctacctcaaggatgcctatgacaatgtgaccctggacgtggagctggctcgccgtgagggctggtgttttggggccaagctggtgcggggcgcatacctggcccaggagcgagcccgtgcggcagagatcggctatgaggaccccatcaaccccacgtacgaggccaccaacgccatgtaccacaggtgcctggactacgtgttggaggagctgaagcacaacgccaaggccaaggtgatggtggcctcccacaatgaggacacagtgcgctttgcactgcgcaggatggaggagctgggcctgcatcctgctgaccaccgggtgtactttggacagctgctaggcatgtgtgaccagatcagcttcccgctgggccaggccggctaccccgtgtacaagtacgtgccctatggccccgtgatggaggtgctgccctacttgtcccgccgtgccctggagaacagcagcctcatgaagggcacccatcgggagcggcagctgctgtggctggagctcttgaggcggctccgaactggcaacctcttccatcgccctgcctagcacccgccagcacacccttagcctccagcaccccccgcccccgcccaggccatcaccacagctgcagccaaccccatcctcacacagattcaccttttttcaccccacacttgcagagctgctggaggtgaggtcaggtgcctcccagccctgcccagagtatgggcactcaggtgtgggccgaacctgatacctgcctgggacagccactggaaacttttgggaactctcctcgaatgtgtgggcccaaggcccccacctctgtgacccccatgtccttggacctagaggattgtccaccttctgccaaggccagcccacacagcccgagccccttggggagcagtggccgggctggggaggcctgcctggtcaataaaccactgttcctgc

SEQ ID NO: 13582 - DNA, 23515 bp, Homo sapiens
gtcccgccatggctctgaggcgcgccctgcccgcgctgcgcccctgcattccccgcttcgtcccgctgtccacggcgccggcctcccgcgagcagcccgcagcgggcccagcggccgtgccaggaggtgggtcggccacggcagtgcggccgccggtgcccgccgtggacttcggcaacgcgcaggaggcgtaccgcagccggcgaacctgggagctggcgcggagcctgctggtgctgcgcttgtgcgcctggcccgcgctgctggcgcgccacgagcaggtgcgcggggtgcaggcgggggcgcgggggcttctgccggtcccgggagcctttacggagcttcctggcctgaaacgggtgcctcccaagcatctcctggagcaagggaagccaggaagggaggcgtttcctgcagtccctctcggacctcgcaaattttcctatttgtcgatgtctaccaactaaaaacaatggtcgttttcatatttacgatatataccacttgtgggaatacagagttatcacttggaatttaaaatggagtattcttcatgttgagacaagagaatcctggtgtagggctcatagcctggaaccccggaattcaaaccccgggacccagcagcttcccagacacggccactctgagaacactgttggggaaaaatgggaagcccctcaaacgcccagctttgaactcacccatggtagctttaaaaagtgtcagggcttttggtggcggtggtggggggcaacaagcagaacactgttttagccgcatcagcctaggggtactagagatgacggttatctccaggtgaccctgggaagagtttgcaaggttccgctttttggcgccagggtatctggtggtgttgatttctcaggtgagactgtacagaggtcgggggctgcacccctggcctcaacaggaggcgggggaaggcgggggacggtgtcagatgagaagcaccgagccacagttgagcttaggtgaggcctcggcgggtgcgaggtgagggcagggatccacgaactcagagtcagatgctgttggcccgaatcccatggggagcgccaaggtcagcctaggacccgtggtggcgggagtgcggaggatggtggaggaagaaggagctgaactggacagatggagggctctgggagggcattgctgtgtgtgcacacaaggatgtcttaaggtcaagttttggtcatagagagccccggccaaggagacaggagggcgagaagggacatcccaggtagaggaactggcaaggtgagggacggcgatgtggaggctttggggagtgcccacatctaaggggcatcccaaaagaggagccagtgctggtggtgctgcaataggaggaggaggcagcagggcagaaatgccaggggagggagtggccagccacaggtccctgcccagggcaaggacgggcatgctaggtggcagctggggccagtcgtgcagaagccatgcccaccttgtggccgggatggagtggggactaggaaggcaccaggtcaggtttctgtaggcacagccctaagcatggctgggatggggagggggctaggaaggcaccaggtcaggtttctgtaggcacagccctaaggtttcttgtctagattcaagacaagttgttgcacagagaagccagcagagctgggtgtggggtttggtgcccagtctgctgcggggaatgccaggtgctgttccgtgactgtgggaggaaactgttggctccgctgtcccttgggtgccttcttgaggcaagtgccagggctcagggatggtgctgtgagtacctggaagaggcagggcatccagaggtgacctctcccaggctcccctagggtcccacctgtgccctgggaagtccctcagtggggtctgtactgttgtcttgctagtggtcccatgggtgtcggcagcctcagcactggaagaaggcagaggccaggtcctgggcttgtgagctgctcactagaacctggtcctgtgagcgggccagaggggagttccttccctcaccctctgggctgtggggagattccttctgctgagccagcacaggtctgtgaggcacccgggcagtgaggccacatctgccacaggcgtgtcaggttgtagtagctgatctttgagctgctgccttggatggggacagcagtggggcccgcccttgcctgaaagccagacttattgaggagggtttaggaaagtcccaggatttccatgacaacagcactgaggttgggtgtgcgccctcacagaagggacaggacccgtggtgacagtggttccctgagtggggggaggggagagaaccggctctaccagtgttactctgcacacatttggttgagtctttcacagggggtacaagtgtatgtgttactggtgcaggtttctaaatcctcgaaggatctcctcacctgaagaagatgtggggctgccctggtctcaggtagtgccatgcggggacatcagtgacaccaggatggtgttaaagtggttgctttgctgtggagtcagctttaaaattacaagccctaggctcatgcctaggcatggtggctcatgcctgtaattctagcacttaaggaggtcaaggcaggaggatcatttaaggctaggagttcaagaccagcctgagcaacatcgtgaaaccctgtctctacaaaatatttttaaaagttagctggggccaggtgcggtggctcatgcctgtcatcccagcactttgggtggccgaggcgggtggatcacctgaagtcaggagtttgagaccagcctggccaacatggagaaaccccatctctactaaaaatataaaaattagctgggcatggtggtgtgcgcctgtaatctctgctacttgggaggctgaggcgggagaatcgcttgaacctgggaggtggaggttgcagtgagccgagattgtgctactgcactccagcctgggcaacaagagcaaaactctgcctcaaaaaaaagaaaaaataaaagttagctgagtgtggtggtgcatgcctgtagtcccaactactctggaggccgagataggagtgtcgcttgagcccaggagtgagaccctgcctctaaaaataaataaataaaaaacttgccagccctgcctgtgtgcttctgcagccctgtgcagggagcttccaccctcagcccgggcccagtcccccagccccccatctttgtgaataagcatccctggagtcagtgcagcctgggctcccgccccttcatttagtgctggccgtgcggaggcgagcagttaggtagagggagactgcgtggccccgtgcggcagtcgacagttgcccaccctccctcctgttgttttctgatggttctctcagagcggatgtggataagcccagtgatggtgttcaggtccccagttctgccccgcctgccacttgggtgatctttgatatgtttcagacccatcctgttctcccaactatccctgggtgctgccagcaggaatgaggcctggctcaggctcagtgggagacggagaacatgtcagcctgttcattttccagtttctaatcctcttgataaaagaacaaaatgccttaaagtcagattctgcttggaggctgcaggaaggcaggggtgagtgcctgggaaaccctggtccttggggctgccccatggcgtgcccaggggtgatggtcaggaggcgtctccatggggcaccaatgttcagggtaaggctgtggggctatgtctgcctgtgggcaggcgtgtgggtgctcagggctggcttgggtgtaagtgtttgactcgctaatggttttgcttagactagaagttgttcctgaaactacggtctcaagagatgctccccacataaaaggagttctagtatccattgggtttgagaaaccccaggctcttcctgtgttggggctgagtcggcaggggcagcagacacaacgcggaggtgtgcttctgagcatcacactcggccctcctctccaagtagcctctcgttgtccctgtcctttctgccctggctgtcccccgtgctggagctcccacagttgtccatgccatctcctcgccttggcaagccccactcctggatctgggttagtaaacacccctgccctaccctgcaggcactgccccatccccctgtcctgagtcataggcagagtccctccttcccctttggggttcctttaccaccaggatgtgagatcctggtcggtttcctttggttgtttccagtctataaaaggtgcttggtgcatggcagcttgggacatctgaatgagcgacgtggtgaaatatgattggaggagacagacagttcccgggcagcatctgtcagagtggctggtcagccccagatgaccctgcagagcgcatgggtcctggggtgggagtcatctcacaggcccctgtggactgtcatctagctcattgtccttgttgccagggcatgcctccctccagctgggcgcagactcagcctgagtttcacacgtttgttatttagcatccattcgggggctggcctcatgccagtcacactgtttaagggacttgggataagagggaacaaaacattgaaaaatctgggcactcaagtactagaaagtcaagttagatcctcctcttccgcagcagaactaccaaggtgtggatacagaggatggtctcaaaatgccggctgtcatccccagggaggctggccattctcctttttatccaccaagcagtggtcaggcacccactgtgtgctgctggagtgactcatgggtggggccctgaaggggcagagtccaggtgggaacagtgtcctcaggccaagcaggcagcacctcctgtggtctctctgccctggatgggaactggagtgatggacagggtggagaagcaagcggctttagctggtcttcaccatgaaactgaccctgaaagcccagtcgccaagagaccatatcgaggccccatggctggggtgaagtgtggtcggggatgagcagcggtgccttgctgggaaaggagagttcaggcagcccaggacagcggcttccctttgcctttcagctgctgtatgtttccaggaaacttctaggacagaggctattcaacaagctcatgaagatgaccttctatgggcattttgtagccggggaggaccaggagtccatccagcccctgcttcggcactacagggccttcggtgtcagcgccatcctggactatggagtggaggaggacctgagccccgaggaggcagagcacaaggagatggagtaaggcctgcccggtgtctgcgggctttctgatcatgaccctggagcacccagtgggagcaggtgggatgtatccagctgctgggcttcagcctcagctgggcagaggccaaggctaggagagcttggtcagcccaactaccgatgaccctcctgggctctgcctggagttcttgcatttttgtttcatgcggtggacagctctgggctttcatgggaggcctggtgtgcgtgaggcctgaggaagcagagtacagaatggcccttggccctatctagtccaccgcctggaggagcacaggcaccagcatatgaaccaagcactctgcaaagaatggttggtctcgcctggatctcacatgagccagggactgctccaggaagtggagggaaacgtggtcttgttgttctgtcctgatgccctgcccaggagggcgggtcagggtggtaccaactgccctctacactcactgcccagggaaggggccttgtatcagcttagtggcctccaggagctgactccaggccggcctgctacactgctcctggcttcaattcccttctccactgacaatggggcaggggccaggcctgggaggttccacaactgcagggcaggctgaggccaggcaagggtcgggcagtgggacctgcctgcgggtcaggaatccctgcaaaagagaggctgtagcagagcctcctccatcaggtcagcaagtttgtgtaaacagccaggtagcacagactctcagtcgggccacaccctccctgccacaacggcttcactctgcctcagtagggccatagtaattagaatttcatataattttcttgtgtcacaaaatattattcttgttttgatttctttcaaccagtttttttaaagtagggtcttgctctgttgcccaggctagagtgcagtggtgccattgttcactgcagccaaccttctgggctcaagtgatcctcccatctgagccccctaagtagctgggaccacaggcacgcaccaccatacctggctaagttttaatttttttttgtaaagatgggatctccctatgtcttcctatgtatttgggtcccctgcaccctgacagcagccgggcctgacccacataaggcttgggacagtccctctgtggacctggtcaggccttggtggttgttcctgcccctcccctggtggctggcctgggaaggggagggaaaggcagtcacatgaggcctccagccctgggaacggaatgtctgaggcttgcctcagcatgtcggctgccagctgcctggagaggattggccaggggagcccagcccctgccttgcgattggctgttttgaaggtggggtactacagccccagcaccccactgtgttcctagcaggccccgtgggccttgcagctgcctgagctcttggctgcagcctttgctgagctgcctgttgaataaccaatggcctgtgtgttctcagaaggagtctgggtggggacttggtttcacaatgggattttcctctcaggcgcctctggtatgaaaagactcctttcccagggtggtcctgcctggcttcctccctgccctgcaggctgagtgtctggaggtggactggcctgcactctgccagggggctgggcacctgtgtccttaggagcttgagtcctttgccctgcaagggattcacctgtcttgctgctggtggctgctgtctgcaggggtcctgctccagctctgggaagtgaacagggttccctcctgtcctcacaggggtgcatgctgaggacacctaccgagctcagctgctttgtgctttcagaggggcctgagccatgggggtagggctgggtctgcaagcactggtctgatgtccacactgcagcatggcctgcttggccaggagtgaccagtcacgcagaccctagtgcagggaactgcttagagatctgccttcctaacctaccctcctgtcacaagggccatgggctctactctggggagagacactgaggccaccgccccaaattaaggccatggcaagtggtgctggccgtgagaggcccagggaggatggaggcgtctgagtgcatggcaaagtgagtcccagcagtgctcccgagaaagaaagaggaggtgggagcctggaggtgcaggagggcaatgcccacccggggggggggtggaccatgcttcccagaggccagggccccacccaaccccaggagaggagtcccagggatccccgaagcaggctgagggcttggggatggggaaggggccaaggcatcttcctgatgattgggctgtgagggaacacctagggggtggatgggggcattggtctggctgtgcaggcccagggctggctggaggcaggatatgtgtgcagtgagtgtcctgagcgaggggctggggaggcagagggttggggagctggggaggggggtacaggtaggaagcggcttgccaggcttccctccaggagagagttggacaagggcggggtgtggacccccatgctctgcttgtttcaataggcatcacgtccccagggacagccacccagagctgaggtggaggctgagggggtggtcagggtcttcctgctgtctctgaagaccccctggggacacgtgcttgtcctcctctgccctatgtccccttgtcgctcttccctcctctgttgtcccaggtcgtgcccatgtgtgcgatcatgtgcccttcaacagactatgccctgggcatgatgaggggtgggactgggggagcacgaggcaggtcctggctttaaggaggcattgggatgtggtccccaccctgatcagggccccacatccactggttcacccttcctcctctaacaccccacagctgccagtgccatgtgcccccctcttccctgtggtgccttgagccaggacgtggcaacgtcccaggtggcgaaagccagatttcctgtgtggcacccgcagttctgaatcagctgctcccagggtgctttcttcctcttctccagtggaaataggacccctgacctgcctgggaaccaccatttgtgtctccttgtgacttatccatgatgcctgttggagagtgtggccctgtccttgctgcgtagccatccactctgagacctggctgcccctctggccactgcacgtgctgtgtggtcatcttggccactgcttggctgtgtcagcctggtctgtgctctggaagttcacggagaggagcagcggtagcctatggtgttctgcctctgagtgtgtcagagcaggagagggagcagccctggcttccccagcctctcctgccaggcccacctcagaggatgaacacagcagctgtgggaatgctgagcgggaactcatctgcctggggacctgtcagataatgatcctgtttcatgaaggtgagctgcctcacaggcagacacctgtgtggttaagtcccgtgttatccaaactgtgggctgtgtggtttcaggatgggaccttctcttcagggtcatggaggcccctgaggccctgtccccactgtctgctgttacttgccatgagggtttctgccctgggcagggccctggctgccaccccggccttaacatagacagtgagtcccccttggggatggcttttcctggctgtacctaagccttggcgtgaaggtcttagggctgatctcatgactggtcttgaggtgcccaagccaggggcccaggagctccctgtctcaggcaggggttcacgtgctgcctgcctgttccctagtcacatggtgacattccaccctcttctgtcacatctctgtcagcataaggtggccagagcatatctgcctgccagctcccatcactgggctgcagcctcaggggccctggcagcacatgtggagtccctggcccatgtggggctgcccaggagtgggtgggagggaaggcctcctggcgggggctcctggcccagggcttgctccttgagcagccaggtggaaagtgggcagctgaggccccttgacatggaggcctctgggatgcggctcactgaccactgctctgcctttccccttcccggcatctgagggggaccctctcctttcctgtgagtgtgggcagagctgcccctgagggtccgagcgcctctggggagcttcaggaaggctctgggtgctgttggtcatgcagctgagctctctccgtggtcactgacttgatcaggtttgaatataaagtcaggtgaccctcagagctgctccgggggccagggagaccatggtcgctttgtcacagcagacttaacggccgcagcaactcttgctagcctggatgacacagcactgaaaccaagtgccagaagcagattgtggctgtggggaggaggaggaagaagaggaggctctggcaggggtgcagggctggtgggggaggggagccaggtaccctagagaagggaggggccagggggaatgggggtgctggccaggcggggatggagaggcttctgcaggaaggacaggggcttggctgagcagagtgtggccagcctagcgggggacagcctgcatcctggcctcactggtcttgaggtgcccaagccaggggcccaggactttgggcattactaggaaatgatgggaaccctgggtggggtggcgtgaaacaagatgagatggtaagatctgctttcactttaaaggaacatttctggttgttgcttggaaaagaagtgtcggggcaagaatgctacaggagggccggcctggaggacagggcgggactgcagggctggctgtgcgggggcaggagcctgtgcttgcatcagagctgcctgggagaccctggctctggggtggaggcctgagtaagggggcctcgctggggatttggggacctctgtgtgctggtgccttcccgcctccgttcctctcagccctgactggctctgtcttggaaccaggtaactacctttatttgagaacctgctgcaagccctgggctgttctgagagctcaggaatatcgttctgatttctccacccacaaggagccccgggcttcctgagcccttgggacacagcagccccataaactgctgcccctcccaggcccaagtgttccaccccaggctaggggtggggctggggctgcaccttggaatctaccctccaccggggttgtggtggggccctccgtgcagcctcagtgggaacgtgcctgtcacctgaggctcaggtggcgtgaccctgacctttgctctccccctccttcccacaggtcctgcacctcagctgcggagagggatggcagtggtgagtgagaggctgccgcgcaggaacagactccctcccgactccgcacaccccttggtggctcaggagagtctaggctggggcacaagtgggccttggggtgacgtcggagcccgggctcctccctatgtccagggcacctgccctgtcgctctgggctctgacatactcgcaagtgtctggggagacgccctgctcctttttcatggcctcctggtggacctaggcctttgttaaggagactgccgtcctggcctcatgaggaggcttagccagggggatgcagcactccaggtggaagagccgcggtgtagacaggagggtgggcttggggatgggaaccatggggcagtgcagtgccagggccaggctggcaaggccactatgcttggagccctcctgagggcaggggccctgggctattggtgtgtgggtgctgggggtgggtgtttggagctgtgctcaggccgtgcattcgctattccaggcacgaataagcgggacaagcaataccaggcccactgggccttcggggaccgcaggaatggtgtcatcagtgcccgcacctacttctacgccaatgaggccaagtgcgacagccacatggagacattcttgcgctgcatcgaagcctcaggtggggccccctctttgctggctatacccctgccatgtcccagcctgagcggacccctgggctcatggaggtgccggtgggtgaacactaagctggggcaggagccagagggctgggttctgaccacacttgggtccctcactgttcagccccttcctgaggggccccactgcctcccagaaggcatctcctctcctgccccagctccctgttccctgatcccgcctcatgccccccacccttctccctggctcagggccaggatcgggagctgcaggaagttggtccatgtcagctgccgagccacacttagcccagggtggaggttccattcagggagctggtgccgcatcttctgtccttccctgacacagcctctgggggccagcggtgggggcagcaggtgtttccagggatagagaagccagaggtcagcaaggcccaatgtccttcagtgttagaaacatccgacctgcacagccccatgctggccccagcagccctccgtcaggggcagcgggtcccaggcctgtttatgtttttgtttgtttgcttcaaatgagactggatcttgctctgtcacccaggctggagtgctcacgcctctaatcccagcaatttgggaggccaaggcgggtggattgcctgagctcagttcaagaccagcctgggcaacatggtgaaactccgtctccactaaaatacaaaaaattagccgggcgtggcagcaggcgcttgtaatcccagctacttgggaggctgagacaggagaatcacttgaatccaggaggcggaggttgcagtgagccaagattgcgccactgcactccagcctgggcgacagagtgagactccatctcaaaaaaaaaaaaaaaaaatgaggtctcactatgttgccctggttggcctggaactcctgggctcaagtgatccctccaccttggcctcccaaagtgctgggattacaggcacacactaccacacccagctaattttcatattttttgtagagatggtgtttcaccatgttgcccaggctggtctcaaactcctggcctcaagcgaaccttacactttggcctcccaaagtgctgggattataggtgcatgccgctgcacctggcacttctgagcagtgcttggaagccgcctcctgatgggggctgagggtcagagtggccagctgaatgctgggccatcagggtgaggggcgtcttctcctcgtccattgcctgttctcccagggcaggtggaaggggaaggccctgcattggggtggcgtgaaacaagatgagatggtaagatctgctttcactttaaaggaacatttctggttgttgcttggaaagaagtgtcaggggcaagaatgctgcaggagggctggcctggaggacagggtgggactgcgggctggctgcacgggggcaggagcctgcgcttgcgtcagaggttcctgagagactcggtctctggggcagaggcctgagcaaggggacctcgctggggtgtctctgtcttagccacgctcggtgtttctgggtcctgtgacccacgtgtgagcagcctgtggtgctggtggcacagggaaggaaaccgaggcagggagcctgtgggggctgcttggcaggggacaggcagctcctgtgcccactgctgtcccacacctgcatggaaacagaaaccccgccacggagccccctcccatctccacagggcctctagagcgccatgtgcaaggacttcatgggcggggtggggtggggtcaggagcctgctgtgggctggccaggccctggccctccctgtcgcaccctgcgctgcctccatgcacctctcagggctgtcatggcttttcctgtggcttctgacaggtagagtcagcgatgacggcttcatagccattaagctcacagcactggggagaccccagtttctggtaagtgctagaaccttccacctgcagagtctggtgctgtgcgagatctcagggcagctgtgggcatccaccaaaaacacaggtgcccatgccttagaggcctgagctggccacaggggctgtgtgggggactggggtgggcaggggcgtgtgcagatggcattcaggcctgcgtttgcagctgcagttctcagaggtgctggccaagtggaggtgcttctttcaccaaatggctgtggagcaagggcaggcgggcctggctgccatggacaccaagctggaggtggcggtgctgcaggtggggcagccttccccttccccactcctgtggcttgtgagggggtgggcaccgtggggtcacacggggcatggtgggcagtggtcggaggtggttttgggaactcacccagggcatgtggctcactctgcagctgctggggttggcctggtggggaggaggaggtcagagggactctgaacagagaggggagatgctggcaggagggctggagacccagccctgcagggcgtgggcgtgcatcagcagcggggtgggaatagacctgtctatgcagtagaaacaaaccagacatggatcctgttcttactaacgatgtaataaagccagaaacagcaccagaggccaatgggtggggggaaggataaaatatgagtgaatggggctgatccaggccttctcacttctcaaggaaagtgtcgcaaagttgggcatcgcatccagggctgagattgaggactggttcacggcagagaccctgggagtgtctgggtgagagcagcccccaggctgagaggacacgagcatcagccatggttccagccaagccccagtgacgtctcccagtcctggctgccctgcctgagagggtgggccctgggatgacagtgctgaaggaactgcttttcacacagcaggacttgatggcttcaggagtccctgaggctggggctgggctgggcaggggagacacagggccagcacagaccccatagagggctctttatagaattatctgggtccagagcaaaggtggcactctcagccctccctggagtccacgccggcaggtgaaggatcagagccccatgccccatccttggagccaggggctgggacccagatcaccaggagcctccagttgaagtggggaggtgactggggtggtgcagtagtgagccatcccctcacacactgccagccttgcccactgtgtcctccctggccgcccggagctgtgtccgcctcctgcctggctgcctgtgctcggcccctccacaagcccaaaacagcctagggtactcagtgttttcagagccgcctagatgcaggactgtttgtgttttggttttaaatttatttaattaatttattttttatagagaccaggtctcaccatgttgcccaggctggtttcaaacccctgggctcaagtgacctgcccgccgcagcccccaaagtgctgggattataagtttgagcccccgcatgccactggttttaaatttttaaacagaaaacaatatttatatttcctctgtcttttaaaactgaacaccgaggtgggttttgtggtgggtggtgaacggacaggtttgggcctcgatcccccacccgaccctagcacccacaggtgggggtgccccctctgctgatgcgcctcctccctcagcaccatggacctgctggactggagcagcctcatcgacagcaggaccaagctgtccaagcacttggtagtccccaacgcacaggtaacacctccgctcctcagtgaggcccagctcagcagggcgctgcgctaagaagggaattcagcctgccacgtgtgtctcttgttgcctaccctgggaacttaacatgaccaaaatcactgcacactatggccccacagaccccctgtggtccagggggaagaagacaagcccactagtgtccacagagtgcttggcgggacagagacccacgcggagccttaagacaccacaaggagagggggtctgggggccttccccaagtcatctgtcttgtgcatcaggtcaccccaaacttcagaggcctgaaacggcagcagccactctgcttctgcctcatggttctggggttgacagggctcagctgggcagtcctcccctggggtctcctgggtagctgtactcacagagtggtggcgctgggacctgggggaggcacccattcacatgtctgggagttggtgctggctgtggcttgggctttttcccaacatggcagctgggctctaagggccagtgtcacctgagacgtgagagccaggcagaagctgggtgaccttttcctgcctcgcctcagaagtcacacggtgtcttttctggcaagttctgtttgttagaagcatgtcaccaggccagcctgtatacagcggggagaggaatgagactcatctgcctgtgggaggggggcccaggacctggcagactgcttgaaaccacagcttaaactgggattcaaagaaagaacagaagcaccttcagaaaacatcctgcagaggcagctttccatgacacatctagccccagtccactaagggcccagcctcaaacttagagcccccgacccagagcctcggggcgcagtgcgtacagtgtggctgtgcaccaaggccaccagctgttggagactttagcatggtgtagcaagggatagagtggtactgtttgtgcccagtgaggcaaggctgctggggccagcaaaggggtgagcgggaggccctgcgggatgggtccccacggcctctgagcaccagcaacttgaaggcctcatcctggtggttgccctggtccctggctacgtgtcagcacgtgctgcacaactgccctgtctgcctgtagccaggggtcttcctcctgggccctctgcctgctccgggtggagcccttctgtttgacgattgggtgatcagtgttcacttgttcaatgtcacatgggagttgcagggggctctcccacaacggtggggcctctgtgggaactggggagtacacacttcggagtgcaggcctggactgagcctggggcccactgacatgggcactgagctccctcgtggtacccctaggccccgcatagggcagtgcactggctgcgttggaggttcaggggcactgtgctgcttgtccaggtggccctccctcccagccctgcacagacgggtgagagggttcctgtgggctgggaatactgagagaggtttagcctgggcctcagggtggcactttcccgcccttgctgtggcctgaccgcgtgttgcacccccagacaggacagctggagcccctgctgtcccggttcactgaggaggaggagctacagatgaccaggatgctacagcggatggatgtcctggccaaggtgagctgtcccgctcgggcagagggtacctgggactcgtggagaagagggcacctgcctcacttgagcaacagttgctcccactctcccaccccctgcgcctctcagaaagccacagagatgggcgtgcggctgatggtggatgccgagcagacctacttccagccggccatcagccgcctgacgctggagatgcagcggaagttcaatgtggagaagccgctcatcttcaacacataccagtgctacctcaaggcaagcccccgctcagcccctccctgcctgccctggggcttggagaccccacaggaggggctcctctcatctgagctccctggcatttggctggttttacactcagcacccaccagggagctcatgggatggaggagggagtgggccgtgcccccaaggggttgttggggtcttctgcagcacagctcacccagcgggccccagggtccaggaaagagccccttaggtggtggccacagccaggcctgcagaggaggctgaggccagggtgactgcctcagagtagcaagaaagacccgctgcccgcaacctctcccctggttctcagaaccagccaagagtgtctaaggagcaggaggaagacaacaatctttatgagggtccactagatgtacccgacaccccaaacttggaaggtgtcacatgaccatttcctccagcgtgttttcagttcagcgcccctaagaacctcctgaaagctttgggccctccccggaaagactcacccaggatgtcacatgtattcagggagcccaccctagcctttgggccccaaactgctcagggatgttagcaggtccagagctctcaggggtgagccggatgcccagaggacacagggtggcatggggaggggtccaggcaggagcatgcagtatgcacccctcccggtcggcctgggagtctggagcacatgatggctgctggcgcctgggctgcacccacagggccgtccacaggccacacaggaagttgcagacgtccccactgccattgctccttggggacagaggttggaggcccatcctcacccacacctgctccaggtgccctgagctgcacctccccaggcagctgctgcccagccctggtgactgcacctgggcccaggaaggccccatcctgctgtcacttgggcttgcccaggctccctgtgacttttggccctggccccacaggatgcctatgacaatgtgaccctggacgtggagctggctcgccgtgagggctggtgttttggggccaagctggtgcggggcgcatacctggcccaggagcgagcccgtgcggcagagatcggctatgaggaccccatcaaccccacgtacgaggccaccaacgccatgtaccacaggtgcgcagctctcccacccctctgtcttctcagggcagggcgccaagaaaccaggcctgagggagaggcttggagactgaacttgtcagccacatgtgtccccaggtcagaactggtatttcctcagcttttatgtcatgtgttactttttcaaaagcattaaggttattcttttataaatatagaaaagcctattgaacaaagcaaaattggccacagttccctgagcttgctcctgcagacacttagatccagagatgtgcatgaacacccggtcctccccaccctgcaggctcagcctgtttgcttttcagttcacacagtgggatcgcccatcagctgttctgcacctgcttttactgctctagtttcttggtgatcttttcatgtagcacaggctggccaaccatgggcttttcctcttagaggcgtgtgtgcatgctgcaaattcagagagaccccaagtgtctcctggttggctccagctcccctcctgcagccgctgtgcatgtcgtgccacagcgcacacatctccgccattgttttttgcgttgtagcgtgtcctctgcccgatgtgtttttcatttcgcgttccatctgggtcctcttgtgtgggcttgcagagtggtgctgtcaacagccagcatggagtgcccggggctatgtgtccagcatctttgatcttattggtttttagtctggttattgtaatggactcgctggacataccgtcaccctctgtggtacacacgggccgtcaggggttttgtgtctgaggatgcagctgtcctaggttgctggaaatggaattgctgggtcagagagaacgtgcgtgtggtcaagcctgctgagtgacctcgctgcaggagggccgtactgctcgggcttcctggtgcaccgggatgcccacccccactgtgccctacagggacctgcttcccttttatttccttgcagggccaggggtgcactgtacgatccctccccagaagcaaagctgtgtctgtcatgaggctcatgggcatgtttgggctggtccccagagtcacagcacgtttgatgcagggactctgcccccacagctggttctgcgtgaattgtctggtcccagacatcgcttttgcttggttgctggtctttctttttcatgaggtgctgggaggggcagatgctgctcctgttcctcctgatcctgtggatacccttggaaagagccagctcaatggatggatctgggtctgccctcggcctcctctctgtgcagctggtaatgagaggtgcaggcagccacaggcctggaactgggctcacatggcactctccacaggtgcctggactacgtgttggaggagctgaagcacaacgccaaggccaaggtgatggtggcctcccacaatgaggacacagtgcgctttgcactgcgcaggtaggtgtgccccaccctgcaccgaaaccccaacctgagccgttgtctcctccggctggggagaggtggcagcagcgcagagctcagggtgggcagagcgacctgctgggtggtcgggcatttgtggggaaaggctggtgaaatgagctggagggtggcttcagtgggcaggcccaggcccgctggcgttctggacatcggactgtgagagcacaatggctttttgcagttacgttggtttttaaaattaacttttttctttttttgagatagaatctcgctctgtcacctatgctggagtgcagtggcgtggtctcggctcactgcaacctccgcttcccaagttcaagcaattcttcatgcctcagcctcccaagtagctgggattacaggcatgtgccaccacgcctggctaatgttttgtatttttagcagagacagggtttcaccgtgttggccagactggtctcaaactcctggcctcaagtgatcctcccttcttggcctcccaaagtgctgggattacaagcatcagccactgtacccagacttttaaaaattaacatctgacttattaaacttcacaattaaaaaactaaatttcatcagggtattcggatggctcctgaaaggtacaaatgcagtgttggaggccagtccctcaggaggcctccacagtgccacctcattaatacgcccttaacattttaactacatctggaatgtaacggtttgttttctctttaaacatttgtcccatggagcacaacttcggtagaattctaacaagtcaaatgcagaagttaggtgaagtcagttcttggatactcctgtactgtcaccctggtcttatctcatgccttagtccaagctatgcacacaatggggtcctaggtccccctcccctcccagattccgccttcccagggatgggaccccctagaaccctcgggggcctgggcagtggcctcgctggctctcgccttcctaggagctgagcaggagctccactctcagcagggcagggtgccccagatccagggcttgtggcacgagggggctccccaagaagctgtgaagccacagggccaggcttggggccagggctgcagccaacaggacacatcctggtgctgctcgggagctgactcacggctctgaaatcattcagtgatgtccacattcagcctttgtttacgatgctgctactttttcatggcctgaaattgcagcacacccatttttgtgccctgatcctctgctaattgtcatagatgtgtcggtgatgggacagactcactttctccacacgcacaggcctggtggccagcactgcccagcactcgggagctggtgggggttcctctcagcttgtaatcaggactcccagcctctgggtggactctcaatgctggtggactcacagcctgactagacacatcaccatccaactccgaaaggacagcctgccctcagcagggcttcctctctccagcttccgcccggcacctgtctgtccctactatcttgctgtggcagtggcttccccagtggacacagcttccccctcccctgagtggcagccgggctctctcctcttggccccaagggccctgtgccaggctcccccagtaccacgctcacatccctgcctgagaggctggacccctgcaggcttcagctctgcccctgctgtgggtggttggggagctctggggagctggggtcccctcccatgggtaagtggttctagactatggcagctgctctgtcctgtgctgggcccagactgccacaccacccaccctcaaacaatcggagttggctttggccaaggaacaaaccagccccaaacttagaggctggaacagtggcatgttctgtaggccaggggtgggctggctcagctgatgcttctgctgctggctgtgcctgtgtccctcctgcgtctgtgatctggggccggtggggcctaatgagctcattcatggctggggcagtaaaggagactgcatcccgggtccagcgtcccacaggccagcccaggcttgagcacgtggtgggctcaggcttccagaaggcctggagagggcaagcctctgcttgtgtcacctttggtacctccctgctggccaaagtgcctcacgaggccaagcccagatgccaggtggagtgagccactgtcctgtgctgggaggagccgcagtcacatggcagaggctgtgcacaccagcaggggagggggcagccagcagtggcacccggctctcgggttcatgtcctggggttgaggaagacacaagatggaagccagggcgatgtggcagagatgggtgcctgctttagactgggtggtcccgggtgatgcgtgagcagcaggcggaactcaccccagggtggggaccccagtgctttgcagaccagcgaagtcgggatacctggatatagtaagctggagatgaaacttgagaactgccactgcgtggatatttcagaccctgagaatctttgtaagacgctatacggggtggtgtgaagacaggacagagtggaggccccaccccagtatctgagcagtgctaatagatatataatgcaagccacatctgtaatttaaaatttagtagctacgttaaaggaaaaagataaaatgaatttcaagaataattttaattaacccaaaatattcaaaatattacttcaaattgtattccagttgcttttagaaaagcaacgcggcatcgtgcattatttttctacaaagtctcctaaatcccgtgtgtatttgacatttgcaacacatctcgattcagagcagccgccttccgaggactcgggggctggtggcagctgtgtgggacacagcagctgtggggatggggcagggcagcagcccacagagggcgagggcaggggccggagaccagtcataccacagaaccctggaggggcttgaggaagggatggcaggagagctgaggagcttctctgccctgtggggcaggctgctgggtgggtcagggcccgaggaagggctgcacctccaagaagggagctagaggagaggtgagagaggagaggggagggaaagcaggtgggaggccttgttggccaagggctgaggcctccccagggagacgagtagggcagcccagcagagtcctgctgggaagaggcctcactggggcagggccaggcagagcccataccccagccccaccttgcaggggatgaagtctggagagtgcagatggggcacctgggatggcaggacaggctcagagctgggacaggagccctgtatccctgcactggggacagtgtcctggaactggccctcagttcctggcttcacctgcacaggatggaggagctgggcctgcatcctgctgaccaccgggtgtactttggacagctgctaggcatgtgtgaccagatcagcttcccgctgggtgagtggggccctccctggtgcgatggggtacggtgctgggcctgggcctcatggtgtatctgcccccatgcaggccaggccggctaccccgtgtacaagtacgtgccctatggccccgtgatggaggtgctgccctacttgtcccgccgtgccctggagaacagcagcctcatgaagggcacccatcgggagcggcagctgctgtggctggagctcttgaggcggctccgaactggcaacctcttccatcgccctgcctagcacccgccagcacacccttagcctccagcaccccccgcccccgcccaggccatcaccacagctgcagccaaccccatcctcacacagattcaccttttttcaccccacacttgcagagctgctggaggtgaggtcaggtgcctcccagccctgcccagagtatgggcactcaggtgtgggccgaacctgatacctgcctgggacagccactggaaacttttgggaactctcctcgaatgtgtgggcccaaggcccccacctctgtgacccccatgtccttggacctagaggattgtccaccttctgccaaggccagcccacacagcccgagccccttggggagcagtggccgggctggggaggcctgcctggtcaataaaccactgttcctgca

SEQ ID NO: 13583 - DNA, 3106 bp, Homo sapiens
gtcccgccatggctctgaggcgcgccctgcccgcgctgcgcccctgcattccccgcttcgtcccgctgtccacggcgccggcctcccgcgagcagcccgcagcgggcccagcggccgtgccaggaggtgggtcggccacggcagtgcggccgccggtgcccgccgtggacttcggcaacgcgcaggaggcgtaccgcagccggcgaacctgggagctggcgcggagcctgctggtgctgcgcttgtgcgcctggcccgcgctgctggcgcgccacgagcagctgctgtatgtttccaggaaacttctaggacagaggctattcaacaagctcatgaagatgaccttctatgggcattttgtagccggggaggaccaggagtccatccagcccctgcttcggcactacagggccttcggtgtcagcgccatcctggactatggagtggaggaggacctgagccccgaggaggcagagcacaaggagatggagtcctgcacctcagctgcggagagggatggcagtggcacgaataagcgggacaagcaataccaggcccactgggccttcggggaccgcaggaatggtgtcatcagtgcccgcacctacttctacgccaatgaggccaagtgcgacagccacatggagacattcttgcgctgcatcgaagcctcaggtagagtcagcgatgacggcttcatagccattaagctcacagcactggggagaccccagtttctgctgcagttctcagaggtgctggccaagtggaggtgcttctttcaccaaatggctgtggagcaagggcaggcgggcctggctgccatggacaccaagctggaggtggcggtgctgcaggaaagtgtcgcaaagttgggcatcgcatccagggctgagattgaggactggttcacggcagagaccctgggagtgtctgggtgagagcagcccccaggctgagaggacacgagcatcagccatggttccagccaagccccagtgacgtctcccagtcctggctgccctgcctgagagggtgggccctgggatgacagtgctgaaggaactgcttttcacacagcaggacttgatggcttcaggagtccctgaggctggggctgggctgggcaggggagacacagggccagcacagaccccatagagggctctttatagaattatctgggtccagagcaaaggtggcactctcagccctccctggagtccacgccggcaggtgaaggatcagagccccatgccccatccttggagccaggggctgggacccagatcaccaggagcctccagttgaagtggggaggtgactggggtggtgcagtagtgagccatcccctcacacactgccagccttgcccactgtgtcctccctggccgcccggagctgtgtccgcctcctgcctggctgcctgtgctcggcccctccacaagcccaaaacagcctagggtactcagtgttttcagagccgcctagatgcaggactgtttgtgttttggttttaaatttatttaattaatttattttttatagagaccaggtctcaccatgttgcccaggctggtttcaaacccctgggctcaagtgacctgcccgccgcagcccccaaagtgctgggattataagtttgagcccccgcatgccactggttttaaatttttaaacagaaaacaatatttatatttcctctgtcttttaaaactgaacaccgaggtgggttttgtggtgggtggtgaacggacaggtttgggcctcgatcccccacccgaccctagcacccacaggtgggggtgccccctctgctgatgcgcctcctccctcagcaccatggacctgctggactggagcagcctcatcgacagcaggaccaagctgtccaagcacttggtagtccccaacgcacagacaggacagctggagcccctgctgtcccggttcactgaggaggaggagctacagatgaccaggatgctacagcggatggatgtcctggccaagaaagccacagagatgggcgtgcggctgatggtggatgccgagcagacctacttccagccggccatcagccgcctgacgctggagatgcagcggaagttcaatgtggagaagccgctcatcttcaacacataccagtgctacctcaaggatgcctatgacaatgtgaccctggacgtggagctggctcgccgtgagggctggtgttttggggccaagctggtgcggggcgcatacctggcccaggagcgagcccgtgcggcagagatcggctatgaggaccccatcaaccccacgtacgaggccaccaacgccatgtaccacaggtgcctggactacgtgttggaggagctgaagcacaacgccaaggccaaggtgatggtggcctcccacaatgaggacacagtgcgctttgcactgcgcaggatggaggagctgggcctgcatcctgctgaccaccgggtgtactttggacagctgctaggcatgtgtgaccagatcagcttcccgctgggccaggccggctaccccgtgtacaagtacgtgccctatggccccgtgatggaggtgctgccctacttgtcccgccgtgccctggagaacagcagcctcatgaagggcacccatcgggagcggcagctgctgtggctggagctcttgaggcggctccgaactggcaacctcttccatcgccctgcctagcacccgccagcacacccttagcctccagcaccccccgcccccgcccaggccatcaccacagctgcagccaaccccatcctcacacagattcaccttttttcaccccacacttgcagagctgctggaggtgaggtcaggtgcctcccagccctgcccagagtatgggcactcaggtgtgggccgaacctgatacctgcctgggacagccactggaaacttttgggaactctcctcgaatgtgtgggcccaaggcccccacctctgtgacccccatgtccttggacctagaggattgtccaccttctgccaaggccagcccacacagcccgagccccttggggagcagtggccgggctggggaggcctgcctggtcaataaaccactgttcctgca

SEQ ID NO: 13584 - DNA, 6386 bp, Homo sapiens
aggaccaggagtccatccagcccctgcttcggcactacagggccttcggtgtcagcgccatcctggactatggagtggaggaggacctgagccccgaggaggcagagcacaaggagatggagtaaggcctgcccggtgtctgcgggctttctgatcatgaccctggagcacccagtgggagcaggtgggatgtatccagctgctgggcttcagcctcagctgggcagaggccaaggctaggagagcttggtcagcccaactaccgatgaccctcctgggctctgcctggagttcttgcatttttgtttcatgcggtggacagctctgggctttcatgggaggcctggtgtgcgtgaggcctgaggaagcagagtacagaatggcccttggccctatctagtccaccgcctggaggagcacaggcaccagcatatgaaccaagcactctgcaaagaatggttggtctcgcctggatctcacatgagccagggactgctccaggaagtggagggaaacgtggtcttgttgttctgtcctgatgccctgcccaggagggcgggtcagggtggtaccaactgccctctacactcactgcccagggaaggggccttgtatcagcttagtggcctccaggagctgactccaggccggcctgctacactgctcctggcttcaattcccttctccactgacaatggggcaggggccaggcctgggaggttccacaactgcagggcaggctgaggccaggcaagggtcgggcagtgggacctgcctgcgggtcaggaatccctgcaaaagagaggctgtagcagagcctcctccatcaggtcagcaagtttgtgtaaacagccaggtagcacagactctcagtcgggccacaccctccctgccacaacggcttcactctgcctcagtagggccatagtaattagaatttcatataattttcttgtgtcacaaaatattattcttgttttgatttctttcaaccagtttttttaaagtagggtcttgctctgttgcccaggctagagtgcagtggtgccattgttcactgcagccaaccttctgggctcaagtgatcctcccatctgagccccctaagtagctgggaccacaggcacgcaccaccatacctggctaagttttaatttttttttgtaaagatgggatctccctatgtcttcctatgtatttgggtcccctgcaccctgacagcagccgggcctgacccacataaggcttgggacagtccctctgtggacctggtcaggccttggtggttgttcctgcccctcccctggtggctggcctgggaaggggagggaaaggcagtcacatgaggcctccagccctgggaacggaatgtctgaggcttgcctcagcatgtcggctgccagctgcctggagaggattggccaggggagcccagcccctgccttgcgattggctgttttgaaggtggggtactacagccccagcaccccactgtgttcctagcaggccccgtgggccttgcagctgcctgagctcttggctgcagcctttgctgagctgcctgttgaataaccaatggcctgtgtgttctcagaaggagtctgggtggggacttggtttcacaatgggattttcctctcaggcgcctctggtatgaaaagactcctttcccagggtggtcctgcctggcttcctccctgccctgcaggctgagtgtctggaggtggactggcctgcactctgccagggggctgggcacctgtgtccttaggagcttgagtcctttgccctgcaagggattcacctgtcttgctgctggtggctgctgtctgcaggggtcctgctccagctctgggaagtgaacagggttccctcctgtcctcacaggggtgcatgctgaggacacctaccgagctcagctgctttgtgctttcagaggggcctgagccatgggggtagggctgggtctgcaagcactggtctgatgtccacactgcagcatggcctgcttggccaggagtgaccagtcacgcagaccctagtgcagggaactgcttagagatctgccttcctaacctaccctcctgtcacaagggccatgggctctactctggggagagacactgaggccaccgccccaaattaaggccatggcaagtggtgctggccgtgagaggcccagggaggatggaggcgtctgagtgcatggcaaagtgagtcccagcagtgctcccgagaaagaaagaggaggtgggagcctggaggtgcaggagggcaatgcccacccggggggggggtggaccatgcttcccagaggccagggccccacccaaccccaggagaggagtcccagggatccccgaagcaggctgagggcttggggatggggaaggggccaaggcatcttcctgatgattgggctgtgagggaacacctagggggtggatgggggcattggtctggctgtgcaggcccagggctggctggaggcaggatatgtgtgcagtgagtgtcctgagcgaggggctggggaggcagagggttggggagctggggaggggggtacaggtaggaagcggcttgccaggcttccctccaggagagagttggacaagggcggggtgtggacccccatgctctgcttgtttcaataggcatcacgtccccagggacagccacccagagctgaggtggaggctgagggggtggtcagggtcttcctgctgtctctgaagaccccctggggacacgtgcttgtcctcctctgccctatgtccccttgtcgctcttccctcctctgttgtcccaggtcgtgcccatgtgtgcgatcatgtgcccttcaacagactatgccctgggcatgatgaggggtgggactgggggagcacgaggcaggtcctggctttaaggaggcattgggatgtggtccccaccctgatcagggccccacatccactggttcacccttcctcctctaacaccccacagctgccagtgccatgtgcccccctcttccctgtggtgccttgagccaggacgtggcaacgtcccaggtggcgaaagccagatttcctgtgtggcacccgcagttctgaatcagctgctcccagggtgctttcttcctcttctccagtggaaataggacccctgacctgcctgggaaccaccatttgtgtctccttgtgacttatccatgatgcctgttggagagtgtggccctgtccttgctgcgtagccatccactctgagacctggctgcccctctggccactgcacgtgctgtgtggtcatcttggccactgcttggctgtgtcagcctggtctgtgctctggaagttcacggagaggagcagcggtagcctatggtgttctgcctctgagtgtgtcagagcaggagagggagcagccctggcttccccagcctctcctgccaggcccacctcagaggatgaacacagcagctgtgggaatgctgagcgggaactcatctgcctggggacctgtcagataatgatcctgtttcatgaaggtgagctgcctcacaggcagacacctgtgtggttaagtcccgtgttatccaaactgtgggctgtgtggtttcaggatgggaccttctcttcagggtcatggaggcccctgaggccctgtccccactgtctgctgttacttgccatgagggtttctgccctgggcagggccctggctgccaccccggccttaacatagacagtgagtcccccttggggatggcttttcctggctgtacctaagccttggcgtgaaggtcttagggctgatctcatgactggtcttgaggtgcccaagccaggggcccaggagctccctgtctcaggcaggggttcacgtgctgcctgcctgttccctagtcacatggtgacattccaccctcttctgtcacatctctgtcagcataaggtggccagagcatatctgcctgccagctcccatcactgggctgcagcctcaggggccctggcagcacatgtggagtccctggcccatgtggggctgcccaggagtgggtgggagggaaggcctcctggcgggggctcctggcccagggcttgctccttgagcagccaggtggaaagtgggcagctgaggccccttgacatggaggcctctgggatgcggctcactgaccactgctctgcctttccccttcccggcatctgagggggaccctctcctttcctgtgagtgtgggcagagctgcccctgagggtccgagcgcctctggggagcttcaggaaggctctgggtgctgttggtcatgcagctgagctctctccgtggtcactgacttgatcaggtttgaatataaagtcaggtgaccctcagagctgctccgggggccagggagaccatggtcgctttgtcacagcagacttaacggccgcagcaactcttgctagcctggatgacacagcactgaaaccaagtgccagaagcagattgtggctgtggggaggaggaggaagaagaggaggctctggcaggggtgcagggctggtgggggaggggagccaggtaccctagagaagggaggggccagggggaatgggggtgctggccaggcggggatggagaggcttctgcaggaaggacaggggcttggctgagcagagtgtggccagcctagcgggggacagcctgcatcctggcctcactggtcttgaggtgcccaagccaggggcccaggactttgggcattactaggaaatgatgggaaccctgggtggggtggcgtgaaacaagatgagatggtaagatctgctttcactttaaaggaacatttctggttgttgcttggaaaagaagtgtcggggcaagaatgctacaggagggccggcctggaggacagggcgggactgcagggctggctgtgcgggggcaggagcctgtgcttgcatcagagctgcctgggagaccctggctctggggtggaggcctgagtaagggggcctcgctggggatttggggacctctgtgtgctggtgccttcccgcctccgttcctctcagccctgactggctctgtcttggaaccaggtaactacctttatttgagaacctgctgcaagccctgggctgttctgagagctcaggaatatcgttctgatttctccacccacaaggagccccgggcttcctgagcccttgggacacagcagccccataaactgctgcccctcccaggcccaagtgttccaccccaggctaggggtggggctggggctgcaccttggaatctaccctccaccggggttgtggtggggccctccgtgcagcctcagtgggaacgtgcctgtcacctgaggctcaggtggcgtgaccctgacctttgctctccccctccttcccacaggtcctgcacctcagctgcggagagggatggcagtggtgagtgagaggctgccgcgcaggaacagactccctcccgactccgcacaccccttggtggctcaggagagtctaggctggggcacaagtgggccttggggtgacgtcggagcccgggctcctccctatgtccagggcacctgccctgtcgctctgggctctgacatactcgcaagtgtctggggagacgccctgctcctttttcatggcctcctggtggacctaggcctttgttaaggagactgccgtcctggcctcatgaggaggcttagccagggggatgcagcactccaggtggaagagccgcggtgtagacaggagggtgggcttggggatgggaaccatggggcagtgcagtgccagggccaggctggcaaggccactatgcttggagccctcctgagggcaggggccctgggctattggtgtgtgggtgctgggggtgggtgtttggagctgtgctcaggccgtgcattcgctattccaggcacgaataagcgggacaagcaataccaggcccactgggccttcggggaccgcaggaatggtgtcatcagtgcccgcacctacttctacgccaatgaggccaagtgcgacagccacatggagacattcttgcgctgcatcgaagcctcaggtggggccccctctttgctggctatacccctgccatgtcccagcctgagcggacccctgggctcatggaggtgccggtgggtgaacactaagctggggcaggagccagagggctgggttctgaccacacttgggtccctcactgttcagccccttcctgaggggccccactgcctcccagaaggcatctcctctcctgccccagctccctgttccctgatcccgcctcatgccccccacccttctccctggctcagggccaggatcgggagctgcaggaagttggtccatgtcagctgccgagccacacttagcccagggtggagg

SEQ ID NO: 13585 - DNA, 632 bp, Homo sapiens
aggaccaggagtccatccagcccctgcttcggcactacagggccttcggtgtcagcgccatcctggactatggagtggaggaggacctgagccccgaggaggcagagcacaaggagatggagtcctgcacctcagctgcggagagggatggcagtggcacgaataagcgggacaagcaataccaggcccactgggccttcggggaccgcaggaatggtgtcatcagtgcccgcacctacttctacgccaatgaggccaagtgcgacagccacatggagacattcttgcgctgcatcgaagcctcaggtggggccccctctttgctggctatacccctgccatgtcccagcctgagcggacccctgggctcatggaggtgccggtgggtgaacactaagctggggcaggagccagagggctgggttctgaccacacttgggtccctcactgttcagccccttcctgaggggccccactgcctcccagaaggcatctcctctcctgccccagctccctgttccctgatcccgcctcatgccccccacccttctccctggctcagggccaggatcgggagctgcaggaagttggtccatgtcagctgccgagccacacttagcccagggtggagg

SEQ ID NO: 13586 - DNA, 7025 bp, Homo sapiens
cttttaaaactgaacaccgaggtgggttttgtggtgggtggtgaacggacaggtttgggcctcgatcccccacccgaccctagcacccacaggtgggggtgccccctctgctgatgcgcctcctccctcagcaccatggacctgctggactggagcagcctcatcgacagcaggaccaagctgtccaagcacttggtagtccccaacgcacaggtaacacctccgctcctcagtgaggcccagctcagcagggcgctgcgctaagaagggaattcagcctgccacgtgtgtctcttgttgcctaccctgggaacttaacatgaccaaaatcactgcacactatggccccacagaccccctgtggtccagggggaagaagacaagcccactagtgtccacagagtgcttggcgggacagagacccacgcggagccttaagacaccacaaggagagggggtctgggggccttccccaagtcatctgtcttgtgcatcaggtcaccccaaacttcagaggcctgaaacggcagcagccactctgcttctgcctcatggttctggggttgacagggctcagctgggcagtcctcccctggggtctcctgggtagctgtactcacagagtggtggcgctgggacctgggggaggcacccattcacatgtctgggagttggtgctggctgtggcttgggctttttcccaacatggcagctgggctctaagggccagtgtcacctgagacgtgagagccaggcagaagctgggtgaccttttcctgcctcgcctcagaagtcacacggtgtcttttctggcaagttctgtttgttagaagcatgtcaccaggccagcctgtatacagcggggagaggaatgagactcatctgcctgtgggaggggggcccaggacctggcagactgcttgaaaccacagcttaaactgggattcaaagaaagaacagaagcaccttcagaaaacatcctgcagaggcagctttccatgacacatctagccccagtccactaagggcccagcctcaaacttagagcccccgacccagagcctcggggcgcagtgcgtacagtgtggctgtgcaccaaggccaccagctgttggagactttagcatggtgtagcaagggatagagtggtactgtttgtgcccagtgaggcaaggctgctggggccagcaaaggggtgagcgggaggccctgcgggatgggtccccacggcctctgagcaccagcaacttgaaggcctcatcctggtggttgccctggtccctggctacgtgtcagcacgtgctgcacaactgccctgtctgcctgtagccaggggtcttcctcctgggccctctgcctgctccgggtggagcccttctgtttgacgattgggtgatcagtgttcacttgttcaatgtcacatgggagttgcagggggctctcccacaacggtggggcctctgtgggaactggggagtacacacttcggagtgcaggcctggactgagcctggggcccactgacatgggcactgagctccctcgtggtacccctaggccccgcatagggcagtgcactggctgcgttggaggttcaggggcactgtgctgcttgtccaggtggccctccctcccagccctgcacagacgggtgagagggttcctgtgggctgggaatactgagagaggtttagcctgggcctcagggtggcactttcccgcccttgctgtggcctgaccgcgtgttgcacccccagacaggacagctggagcccctgctgtcccggttcactgaggaggaggagctacagatgaccaggatgctacagcggatggatgtcctggccaaggtgagctgtcccgctcgggcagagggtacctgggactcgtggagaagagggcacctgcctcacttgagcaacagttgctcccactctcccaccccctgcgcctctcagaaagccacagagatgggcgtgcggctgatggtggatgccgagcagacctacttccagccggccatcagccgcctgacgctggagatgcagcggaagttcaatgtggagaagccgctcatcttcaacacataccagtgctacctcaaggcaagcccccgctcagcccctccctgcctgccctggggcttggagaccccacaggaggggctcctctcatctgagctccctggcatttggctggttttacactcagcacccaccagggagctcatgggatggaggagggagtgggccgtgcccccaaggggttgttggggtcttctgcagcacagctcacccagcgggccccagggtccaggaaagagccccttaggtggtggccacagccaggcctgcagaggaggctgaggccagggtgactgcctcagagtagcaagaaagacccgctgcccgcaacctctcccctggttctcagaaccagccaagagtgtctaaggagcaggaggaagacaacaatctttatgagggtccactagatgtacccgacaccccaaacttggaaggtgtcacatgaccatttcctccagcgtgttttcagttcagcgcccctaagaacctcctgaaagctttgggccctccccggaaagactcacccaggatgtcacatgtattcagggagcccaccctagcctttgggccccaaactgctcagggatgttagcaggtccagagctctcaggggtgagccggatgcccagaggacacagggtggcatggggaggggtccaggcaggagcatgcagtatgcacccctcccggtcggcctgggagtctggagcacatgatggctgctggcgcctgggctgcacccacagggccgtccacaggccacacaggaagttgcagacgtccccactgccattgctccttggggacagaggttggaggcccatcctcacccacacctgctccaggtgccctgagctgcacctccccaggcagctgctgcccagccctggtgactgcacctgggcccaggaaggccccatcctgctgtcacttgggcttgcccaggctccctgtgacttttggccctggccccacaggatgcctatgacaatgtgaccctggacgtggagctggctcgccgtgagggctggtgttttggggccaagctggtgcggggcgcatacctggcccaggagcgagcccgtgcggcagagatcggctatgaggaccccatcaaccccacgtacgaggccaccaacgccatgtaccacaggtgcgcagctctcccacccctctgtcttctcagggcagggcgccaagaaaccaggcctgagggagaggcttggagactgaacttgtcagccacatgtgtccccaggtcagaactggtatttcctcagcttttatgtcatgtgttactttttcaaaagcattaaggttattcttttataaatatagaaaagcctattgaacaaagcaaaattggccacagttccctgagcttgctcctgcagacacttagatccagagatgtgcatgaacacccggtcctccccaccctgcaggctcagcctgtttgcttttcagttcacacagtgggatcgcccatcagctgttctgcacctgcttttactgctctagtttcttggtgatcttttcatgtagcacaggctggccaaccatgggcttttcctcttagaggcgtgtgtgcatgctgcaaattcagagagaccccaagtgtctcctggttggctccagctcccctcctgcagccgctgtgcatgtcgtgccacagcgcacacatctccgccattgttttttgcgttgtagcgtgtcctctgcccgatgtgtttttcatttcgcgttccatctgggtcctcttgtgtgggcttgcagagtggtgctgtcaacagccagcatggagtgcccggggctatgtgtccagcatctttgatcttattggtttttagtctggttattgtaatggactcgctggacataccgtcaccctctgtggtacacacgggccgtcaggggttttgtgtctgaggatgcagctgtcctaggttgctggaaatggaattgctgggtcagagagaacgtgcgtgtggtcaagcctgctgagtgacctcgctgcaggagggccgtactgctcgggcttcctggtgcaccgggatgcccacccccactgtgccctacagggacctgcttcccttttatttccttgcagggccaggggtgcactgtacgatccctccccagaagcaaagctgtgtctgtcatgaggctcatgggcatgtttgggctggtccccagagtcacagcacgtttgatgcagggactctgcccccacagctggttctgcgtgaattgtctggtcccagacatcgcttttgcttggttgctggtctttctttttcatgaggtgctgggaggggcagatgctgctcctgttcctcctgatcctgtggatacccttggaaagagccagctcaatggatggatctgggtctgccctcggcctcctctctgtgcagctggtaatgagaggtgcaggcagccacaggcctggaactgggctcacatggcactctccacaggtgcctggactacgtgttggaggagctgaagcacaacgccaaggccaaggtgatggtggcctcccacaatgaggacacagtgcgctttgcactgcgcaggtaggtgtgccccaccctgcaccgaaaccccaacctgagccgttgtctcctccggctggggagaggtggcagcagcgcagagctcagggtgggcagagcgacctgctgggtggtcgggcatttgtggggaaaggctggtgaaatgagctggagggtggcttcagtgggcaggcccaggcccgctggcgttctggacatcggactgtgagagcacaatggctttttgcagttacgttggtttttaaaattaacttttttctttttttgagatagaatctcgctctgtcacctatgctggagtgcagtggcgtggtctcggctcactgcaacctccgcttcccaagttcaagcaattcttcatgcctcagcctcccaagtagctgggattacaggcatgtgccaccacgcctggctaatgttttgtatttttagcagagacagggtttcaccgtgttggccagactggtctcaaactcctggcctcaagtgatcctcccttcttggcctcccaaagtgctgggattacaagcatcagccactgtacccagacttttaaaaattaacatctgacttattaaacttcacaattaaaaaactaaatttcatcagggtattcggatggctcctgaaaggtacaaatgcagtgttggaggccagtccctcaggaggcctccacagtgccacctcattaatacgcccttaacattttaactacatctggaatgtaacggtttgttttctctttaaacatttgtcccatggagcacaacttcggtagaattctaacaagtcaaatgcagaagttaggtgaagtcagttcttggatactcctgtactgtcaccctggtcttatctcatgccttagtccaagctatgcacacaatggggtcctaggtccccctcccctcccagattccgccttcccagggatgggaccccctagaaccctcgggggcctgggcagtggcctcgctggctctcgccttcctaggagctgagcaggagctccactctcagcagggcagggtgccccagatccagggcttgtggcacgagggggctccccaagaagctgtgaagccacagggccaggcttggggccagggctgcagccaacaggacacatcctggtgctgctcgggagctgactcacggctctgaaatcattcagtgatgtccacattcagcctttgtttacgatgctgctactttttcatggcctgaaattgcagcacacccatttttgtgccctgatcctctgctaattgtcatagatgtgtcggtgatgggacagactcactttctccacacgcacaggcctggtggccagcactgcccagcactcgggagctggtgggggttcctctcagcttgtaatcaggactcccagcctctgggtggactctcaatgctggtggactcacagcctgactagacacatcaccatccaactccgaaaggacagcctgccctcagcagggcttcctctctccagcttccgcccggcacctgtctgtccctactatcttgctgtggcagtggcttccccagtggacacagcttccccctcccctgagtggcagccgggctctctcctcttggccccaagggccctgtgccaggctcccccagtaccacgctcacatccctgcctgagaggctggacccctgcaggcttcagctctgcccctgctgtgggtggttggggagctctggggagctggggtcccctcccatgggtaagtggttctagactatggcagctgctctgtcctgtgctgggcccagactgccacaccacccaccctcaaacaatcggagttggctttggccaaggaacaaaccagccccaaacttagaggctggaacagtggcatgttctgtaggccaggggtgggctggctcagctgatgcttctgctgctggctgtgcctgtgtccctcctgcgtctgtgatctggggccggtggggcctaatgagctcattcatggctggggcagtaaaggagactgcatcccgggtccagcgtcccacaggccagcccaggcttgagcacgtggtgggctcaggcttccagaaggcctggagagggcaagcctctgcttgtgtcacctttggtacctccctgctggccaaagtgcctcacgaggccaagcccagatgccaggtggagtgagccactgtcctgtgctgggaggagccgcagtcacatggcagaggctgtgcacaccagcaggggagggggcagccagcagtggcacccggctctcgggttcatgtcctggggttgaggaagacacaagatggaagccagggcgatgtggcagagatgggtgcctgctttagactgggtggtcccg

SEQ ID NO: 13587 - DNA, 4739 bp, Homo sapiens
cttttaaaactgaacaccgaggtgggttttgtggtgggtggtgaacggacaggtttgggcctcgatcccccacccgaccctagcacccacaggtgggggtgccccctctgctgatgcgcctcctccctcagcaccatggacctgctggactggagcagcctcatcgacagcaggaccaagctgtccaagcacttggtagtccccaacgcacaggtaacacctccgctcctcagtgaggcccagctcagcagggcgctgcgctaagaagggaattcagcctgccacgtgtgtctcttgttgcctaccctgggaacttaacatgaccaaaatcactgcacactatggccccacagaccccctgtggtccagggggaagaagacaagcccactagtgtccacagagtgcttggcgggacagagacccacgcggagccttaagacaccacaaggagagggggtctgggggccttccccaagtcatctgtcttgtgcatcaggtcaccccaaacttcagaggcctgaaacggcagcagccactctgcttctgcctcatggttctggggttgacagggctcagctgggcagtcctcccctggggtctcctgggtagctgtactcacagagtggtggcgctgggacctgggggaggcacccattcacatgtctgggagttggtgctggctgtggcttgggctttttcccaacatggcagctgggctctaagggccagtgtcacctgagacgtgagagccaggcagaagctgggtgaccttttcctgcctcgcctcagaagtcacacggtgtcttttctggcaagttctgtttgttagaagcatgtcaccaggccagcctgtatacagcggggagaggaatgagactcatctgcctgtgggaggggggcccaggacctggcagactgcttgaaaccacagcttaaactgggattcaaagaaagaacagaagcaccttcagaaaacatcctgcagaggcagctttccatgacacatctagccccagtccactaagggcccagcctcaaacttagagcccccgacccagagcctcggggcgcagtgcgtacagtgtggctgtgcaccaaggccaccagctgttggagactttagcatggtgtagcaagggatagagtggtactgtttgtgcccagtgaggcaaggctgctggggccagcaaaggggtgagcgggaggccctgcgggatgggtccccacggcctctgagcaccagcaacttgaaggcctcatcctggtggttgccctggtccctggctacgtgtcagcacgtgctgcacaactgccctgtctgcctgtagccaggggtcttcctcctgggccctctgcctgctccgggtggagcccttctgtttgacgattgggtgatcagtgttcacttgttcaatgtcacatgggagttgcagggggctctcccacaacggtggggcctctgtgggaactggggagtacacacttcggagtgcaggcctggactgagcctggggcccactgacatgggcactgagctccctcgtggtacccctaggccccgcatagggcagtgcactggctgcgttggaggttcaggggcactgtgctgcttgtccaggtggccctccctcccagccctgcacagacgggtgagagggttcctgtgggctgggaatactgagagaggtttagcctgggcctcagggtggcactttcccgcccttgctgtggcctgaccgcgtgttgcacccccagacaggacagctggagcccctgctgtcccggttcactgaggaggaggagctacagatgaccaggatgctacagcggatggatgtcctggccaaggtgagctgtcccgctcgggcagagggtacctgggactcgtggagaagagggcacctgcctcacttgagcaacagttgctcccactctcccaccccctgcgcctctcagaaagccacagagatgggcgtgcggctgatggtggatgccgagcagacctacttccagccggccatcagccgcctgacgctggagatgcagcggaagttcaatgtggagaagccgctcatcttcaacacataccagtgctacctcaaggatgcctatgacaatgtgaccctggacgtggagctggctcgccgtgagggctggtgttttggggccaagctggtgcggggcgcatacctggcccaggagcgagcccgtgcggcagagatcggctatgaggaccccatcaaccccacgtacgaggccaccaacgccatgtaccacaggtgcctggactacgtgttggaggagctgaagcacaacgccaaggccaaggtgatggtggcctcccacaatgaggacacagtgcgctttgcactgcgcaggtaggtgtgccccaccctgcaccgaaaccccaacctgagccgttgtctcctccggctggggagaggtggcagcagcgcagagctcagggtgggcagagcgacctgctgggtggtcgggcatttgtggggaaaggctggtgaaatgagctggagggtggcttcagtgggcaggcccaggcccgctggcgttctggacatcggactgtgagagcacaatggctttttgcagttacgttggtttttaaaattaacttttttctttttttgagatagaatctcgctctgtcacctatgctggagtgcagtggcgtggtctcggctcactgcaacctccgcttcccaagttcaagcaattcttcatgcctcagcctcccaagtagctgggattacaggcatgtgccaccacgcctggctaatgttttgtatttttagcagagacagggtttcaccgtgttggccagactggtctcaaactcctggcctcaagtgatcctcccttcttggcctcccaaagtgctgggattacaagcatcagccactgtacccagacttttaaaaattaacatctgacttattaaacttcacaattaaaaaactaaatttcatcagggtattcggatggctcctgaaaggtacaaatgcagtgttggaggccagtccctcaggaggcctccacagtgccacctcattaatacgcccttaacattttaactacatctggaatgtaacggtttgttttctctttaaacatttgtcccatggagcacaacttcggtagaattctaacaagtcaaatgcagaagttaggtgaagtcagttcttggatactcctgtactgtcaccctggtcttatctcatgccttagtccaagctatgcacacaatggggtcctaggtccccctcccctcccagattccgccttcccagggatgggaccccctagaaccctcgggggcctgggcagtggcctcgctggctctcgccttcctaggagctgagcaggagctccactctcagcagggcagggtgccccagatccagggcttgtggcacgagggggctccccaagaagctgtgaagccacagggccaggcttggggccagggctgcagccaacaggacacatcctggtgctgctcgggagctgactcacggctctgaaatcattcagtgatgtccacattcagcctttgtttacgatgctgctactttttcatggcctgaaattgcagcacacccatttttgtgccctgatcctctgctaattgtcatagatgtgtcggtgatgggacagactcactttctccacacgcacaggcctggtggccagcactgcccagcactcgggagctggtgggggttcctctcagcttgtaatcaggactcccagcctctgggtggactctcaatgctggtggactcacagcctgactagacacatcaccatccaactccgaaaggacagcctgccctcagcagggcttcctctctccagcttccgcccggcacctgtctgtccctactatcttgctgtggcagtggcttccccagtggacacagcttccccctcccctgagtggcagccgggctctctcctcttggccccaagggccctgtgccaggctcccccagtaccacgctcacatccctgcctgagaggctggacccctgcaggcttcagctctgcccctgctgtgggtggttggggagctctggggagctggggtcccctcccatgggtaagtggttctagactatggcagctgctctgtcctgtgctgggcccagactgccacaccacccaccctcaaacaatcggagttggctttggccaaggaacaaaccagccccaaacttagaggctggaacagtggcatgttctgtaggccaggggtgggctggctcagctgatgcttctgctgctggctgtgcctgtgtccctcctgcgtctgtgatctggggccggtggggcctaatgagctcattcatggctggggcagtaaaggagactgcatcccgggtccagcgtcccacaggccagcccaggcttgagcacgtggtgggctcaggcttccagaaggcctggagagggcaagcctctgcttgtgtcacctttggtacctccctgctggccaaagtgcctcacgaggccaagcccagatgccaggtggagtgagccactgtcctgtgctgggaggagccgcagtcacatggcagaggctgtgcacaccagcaggggagggggcagccagcagtggcacccggctctcgggttcatgtcctggggttgaggaagacacaagatggaagccagggcgatgtggcagagatgggtgcctgctttagactgggtggtcccg

SEQ ID NO: 13588 - DNA, 23777 bp, Homo sapiens; identical to SEQ ID NO: 1240

SEQ ID NO: 13589 - DNA, 2405 bp, Homo sapiens
ggtctcactctgttgctgtcttcacggagagcaggagcagaggctttgagaagccagtgggccttggcctcagccctgccggcagagggtccccaccatgcagctgaagtgccagggtgcttgtgaagtctaagcccttgtctggcatttgtcaggaatataggcgcacacttaagcggcccgggcgggtaccgccgtcccgccatggctctgaggcgcgccctgcccgcgctgcgcccctgcattccccgcttcgtcccgctgtccacggcgccggcctcccgcgagcagcccgcagcgggcccagcggccgtgccaggaggtgggtcggccacggcagtgcggccgccggtgcccgccgtggacttcggcaacgcgcaggaggcgtaccgcagccggcgaacctgggagctggcgcggagcctgctggtgctgcgcttgtgcgcctggcccgcgctgctggcgcgccacgagcagctgctgtatgtttccaggaaacttctaggacagaggctattcaacaagctcatgaagatgaccttctatgggcattttgtagccggggaggaccaggagtccatccagcccctgcttcggcactacagggccttcggtgtcagcgccatcctggactatggagtggaggaggacctgagccccgaggaggcagagcacaaggagatggagtcctgcacctcagctgcggagagggatggcagtggcacgaataagcgggacaagcaataccaggcccactgggccttcggggaccgcaggaatggtgtcatcagtgcccgcacctacttctacgccaatgaggccaagtgcgacagccacatggagacattcttgcgctgcatcgaagcctcaggtagagtcagcgatgacggcttcatagccattaagctcacagcactggggagaccccagtttctgctgcagttctcagaggtgctggccaagtggaggtgcttctttcaccaaatggctgtggagcaagggcaggcgggcctggctgccatggacaccaagctggaggtggcggtgctgcaggaaagtgtcgcaaagttgggcatcgcatccagggctgagattgaggactggttcacggcagagaccctgggagtgtctggcaccatggacctgctggactggagcagcctcatcgacagcaggaccaagctgtccaagcacttggtagtccccaacgcacagacaggacagctggagcccctgctgtcccggttcactgaggaggaggagctacagatgaccaggatgctacagcggatggatgtcctggccaagaaagccacagagatgggcgtgcggctgatggtggatgccgagcagacctacttccagccggccatcagccgcctgacgctggagatgcagcggaagttcaatgtggagaagccgctcatcttcaacacataccagtgctacctcaaggatgcctatgacaatgtgaccctggacgtggagctggctcgccgtgagggctggtgttttggggccaagctggtgcggggcgcatacctggcccaggagcgagcccgtgcggcagagatcggctatgaggaccccatcaaccccacgtacgaggccaccaacgccatgtaccacaggtgcctggactacgtgttggaggagctgaagcacaacgccaaggccaaggtgatggtggcctcccacaatgaggacacagtgcgctttgcactgcgcaggatggaggagctgggcctgcatcctgctgaccaccgggtgtactttggacagctgctaggcatgtgtgaccagatcagcttcccgctgggccaggccggctaccccgtgtacaagtacgtgccctatggccccgtgatggaggtgctgccctacttgtcccgccgtgccctggagaacagcagcctcatgaagggcacccatcgggagcggcagctgctgtggctggagctcttgaggcggctccgaactggcaacctcttccatcgccctgcctagcacccgccagcacacccttagcctccagcaccccccgcccccgcccaggccatcaccacagctgcagccaaccccatcctcacacagattcaccttttttcaccccacacttgcagagctgctggaggtgaggtcaggtgcctcccagccctgcccagagtatgggcactcaggtgtgggccgaacctgatacctgcctgggacagccactggaaacttttgggaactctcctcgaatgtgtgggcccaaggcccccacctctgtgacccccatgtccttggacctagaggattgtccaccttctgccaaggccagcccacacagcccgagccccttggggagcagtggccgggctggggaggcctgcctggtcaataaaccactgttcctgcagctg

SEQ ID NO: 13590 - DNA, 2414 bp, Homo sapiens
agaaggtttccggttccggtgtaacgttcgggctccgtctcaggggctgaagtttgtgaggtgtagtattgagtcctgtttgagctattgttctctttttcctgaaaaatggcactgtcaaagagggagctggatgagctgaaaccatggatagagaagacagtgaagagggtcctgggtttctcagagcctacggtggtcacagcagcattgaactgtgtggggaagggcatggacaagaagaaggcagccgatcatctgaaaccttttcttgatgattctactctccgatttgtggacaaactgtttgaggctgtggaggaaggccgaagctctaggcattccaagtctagcagtgacaggagcagaaaacgagagctaaaggaggtgtttggtgatgactctgagatctctaaagaatcatcaggagtaaagaagcgacgaataccccgttttgaggaggtggaagaagagccagaggtgatccctgggcctccatcagagagccctggcatgctgactaagctccagatcaaacagatgatggaggcagcaacacgacaaatcgaggagaggaaaaaacagctgagcttcattagcccccctacacctcagccaaagactccttcttcctcccaaccagaacgacttcctattggcaacactattcagccctcccaggctgccactttcatgaatgatgccattgagaaggcaaggaaagcagctgaactgcaagctcgaatccaagcccagctggcactgaagccaggactcatcggcaatgccaacatggtgggcctggctaatctccatgccatgggcattgctcccccgaaggtggagttaaaagaccaaacgaaacctacaccactgatcctggatgagcaagggcgcactgtagatgcaacaggcaaggagattgagctgacacaccgcatgcctactctgaaagccaatattcgtgctgtgaagagggaacaattcaagcaacaactaaaggaaaagccatcagaagacatggaatccaataccttttttgacccccgagtctccattgccccttcccagcgccagagacgcacttttaaattccatgacaagggcaaatttgagaagattgctcagcgattacggacaaaggctcaactggagaagctacaggcagagatttcacaagcagctcgaaaaacaggcatccatacttcgactaggcttgccctcattgctcctaagaaggagctaaaggaaggagatattcctgaaattgagtggtgggactcttacataatccccaatggctttgatcttacagaggaaaatcccaagagagaagattattttggaatcacaaatcttgttgaacatccagcccagctcaatcctccagttgacaatgacacaccagttactctgggagtatatcttaccaagaaggaacagaaaaaacttcggagacaaacaaggagggaagcacagaaggaactacaagaaaaagtcaggctgggcctgatgcctcctccagaacccaaagtgagaatttctaatttgatgcgagtattaggaacagaagctgttcaagaccccacgaaggtagaagcccacgtcagagctcagatggcaaaaagacagaaagcgcatgaagaggccaacgctgcccgaaaactcacagcagaacagagaaaggtcaagaaaattaaaaagcttaaagaagacatttcacagggggtacacatatctgtatatagagttcgaaatttgagcaacccagccaagaagttcaagattgaagccaatgctgggcaactgtacctgacaggggtggtggtactgcacaaggatgtcaacgtggtagtagtggaagggggccccaaggcccagaagaaatttaagcgtcttatgctgcatcggataaagtgggatgaacagacatctaacacaaagggagatgatgatgaggagtctgatgaggaagctgtgaagaaaaccaacaaatgtgtactagtctgggagggtacagccaaagaccggagctttggagagatgaagtttaaacagtgtcctacagagaacatggctcgtgagcatttcaaaaagcatggggctgaacactactgggaccttgcgctgagtgaatctgtgttagagtccactgattgagactactgcaagcccttgcctctcctcccttgcctttgtctcttcagtcctctcacttattctatttcccaaccccctcccacttgtttgtgtgatctcagaactgtgccaagcagacactgggacaaagggagaatatcttgctcccctcctgagtcagcctggtgttgccctttattccccttatgtgcatatgattaaagagttatttttaaacttggtgtgatatttttcacacattcgtaagtattaga

SEQ ID NO: 13591 - DNA, 25421 bp, Homo sapiens
tggggattactgaagaagaaagagaaagcccctgtcctggaagagcttagacttagttgggaaaactatactaacattgaaatacttaacacttggcaaacagaatatcaacaatgtaatttaacctaatatgaaccaagctcttacacgctaagagaatgtgaaacaaaagtttaatcagagtgggataggttataatgaggaaaacttcttggaggaggtgagttttaggcaggatttggaacaggggttgtggaaaagttgagagaaatcattataaatgtgagcagtagcatttgcaaagaccttgagatgggaacatttataagaacatgggaatgaaatttgtttgactggattaggagaatgttgaagttgggtgagatggagagtctagtagaccctgcttctggcaggtggctatttgcaaggttgtgtcatattcccctgggaatagccagaaaatgctggtaggggctaggataattcttcccttctccccacggggagggatacagcttttctttcatcttgggttcccttaggaggtgtttggtgatgactctgagatctctaaagaatcatcaggagtaaagaagcgacgaataccccgttttgaggaggtggaagaagagccagaggtgatccctgggcctccatcagagagccctggcatgctgactaagctccaggttagtgattagggactggaagcaaagtggttttgtgagttgaagaagcaaaaggtgcatgggtctgtatttattgtggaattttttttttttttttttttttgaggtggagttttgctcttgtcacccaggctggaatacagtggcgcgatctcagctcactgcaacctccgcctcccgggttcaagcaaatctcctgtctcagcctactgagtagctgggattagaggcacccaccaccaagcctggctaatttttgtatttttagtagagatggggtttcaccatgttggccaggctggtcttgaactcctgatgtcaggtgatgcactcaccttggcctctcagagtgctagaattacaggagcgagccactgcgcccggctaattttttgtatttcttttagtagagacagggtttcaccatgttgggcaggctggtcttcaacttctgacctcaggtcatctgcccaccttcgcctcccagagtgctgggattataggcgtgagccagcgtgcctcgccttattgtgatcttgatttgaattagtgtttagcatttggggtaaacttttttttttgagatagagtttcactctgttgcccatgctggagtgtagtggcgtgatctcagctcacggcaacctccacctcccaggttcaagcgattctcctgcctaagcctccggagtagctgggactacatgcgaacaccactacgcctggctaatttttgtatttttagtacagatggtattttgtcatgttggccaggctgctctggaactcctggcctcaagtgatctgccacctcagccgcccaaatggctgggattacaggtgtgagccaccatgccaggccagcatttgggaaaattttatttcctgctttatgttttagcgttctttgatttgaccaggagtattctaggtaagggtattgaaattgccatttactgtggcaagcaaagtgtgttatgtacattatttgcctaattacctatgtcgttgagtcattgagaaaattaaatgaaatgatcagaactcatcttaatgacagaggagactctccaaacataatgcaaagaagatataatccactgataaataattttaagttgactttatttttttttaacaggaagtatttgtgttttttcaattggcattgttaaataataccacataagtgtttcttttaccatttaatatttgaggggggtaatagaacatatacagaaatatgggtgggtggatttgcatatatgtgatatttacagaaggaaagaaatggattttttttgtgtgtgtgtgtgagatgttctctctgtcactcaggctggagcgcagtggtgcgatctcggttcactgcagcctctgcctcccaggttcaagtgattctcctgcctcagcctcctaagtagctgggattataggcatgtgccaccacgcacggctaatttttgtatttttagtagagacagggtttcaccatgttgaccaggctggtctggaactcctgacctcaagtgatctgcctaccttggcctcccaaattgctgggattataggcgtgagccaccgtacctagcctgtttttgtttttcaggcaaggtctcacttttttgtccaggctggagttcagtggcgagatcttggcttactgcaacctctgcctcccgggcttgagtgatcctcccaccttggcttcccaagtagctgggactacaggtcaccatgcctggctgatttttgtattttttttaaagattgagttccaccatgttgcccaggctggtcttgaactcctgggctgaaatgatcctcctgcctcagcctcccaaagtgctggacttacaggcgtgagctaccacgcccagccaattattttcttttttggggggtgggggatggagtcttgctctgtcacttaggctggagtacggtggcgcgttctcggctcactgcaacctctgcctcccgggttcacgccattctcctgcctcagcctcctgagtagctgggactacaggtatgtaccaccatgcccgactaattttttgtatttttagtagagatggggtttcaccatgttagccaggatggtcttgatctcctgacctcgtgatccacccgcctcggcctcccaaagtgctgggattacaggcatgagccaccgtgccaggcccaatgatgttttttatggagaatggggatggacgtattcacaacatatccttttgttatgtttctttcttttttttttttgagacggagtctcactctgtcgcccagagtggagtgtaatggcgctatctcggctcactgcaacctccgcctcccgggttcaagctattcttctgcctcagtcccttgagtagctgggattacaggcacgcgccaccacgcctagctaatttttttgtatgtttagtagagacggggtttcaccatgttggtcaggctggtctcgaactcctgacctcgtgatccgcccggctcggcctcccaaagtgctgggattacagacgtgagctgccaggcccagcctgtaatttttcattttattttattttattttttgagacggagtctcgctcttgcactgttgcctaggctggagtgcaatgccgtgatctcagctcactgcaacgtccgcctcctgggttccagcagttctcctgcctcagcctcctgagtagctgagattacagaacgtgcatcaccatgtccagctaatttttgtatttttagtagagatggggtttcaccctgttagccaggatggtctcgatctcctgacctcgtgatccacctgcctcagcctcccaaagtattgggattacaggcgtgagccaccacgcccagccctgtaatttttaatttttttattttctttctttctttacttatttagagatggagtctccccctgttgtccaggctggagtgcagtggcatgatcttggctcactgtaacctccaccttctggattcaagcgcttctcctgcctcagcctcctgagtagctggcattacaggcgcccaccaccacacccggctaatttttgtatttttactagagacggtgtttcaccatgttagccaggctggtcttcagctcctgacctcaagtgattcgcccacctcagcctctcaaagtgctgggattacaggcgtgagccaccatgcctgacccttccgtaatttttgaattttgaatatatcacctattcaagaaaaaatgttaaagacaaatgtttaaaaatatcttgaagcagtttaagaacaggtctgttttgcaaaatgtaagaggagttgtttggccataccctcaaagcttatcattctgaacttctttaggacagaaggggtttatagagactagggagcaggtctttgcaccatcgtctcttgtttcccaaactagtagttcaagtactaatatcatgattttttaaaaaaaattaagtataggctgggtgcggtggctcacacctgtaatcccagcactttgagaggccgaggtgggcggatcacgaggtcaggagatcgagaccatcctggctaacagggtgaaaccccatctctactaaaaatacaaaaaattagccgggcgtggtggtgggcgcctatagtcccagctactcgggatgctgaggcaggagaatggcatgaacccgggaggcagagcttgcagtgagccaagatcgcaccactgcactccagcctgagtgacagagcgagactccatctcaaaaaaaaaaaagaaaattaagtataatattttgtgtaggttctgttaggtttgcatgcattatttaagtggttaacactagacctgtaaggtaggtactgttttcttcccccttctagacacttaggaggtttagagactaagttccttatccaagataacaaaggcattaagtggcagagttaagattcaaactcaggtttctctgactccagagtctcaatcatcacactatattactacctaatatgctaatcttgctttaggaacatgggttgaaaaattccagtgctcacttatcttgactaaattttttgcactgtggtgcaggcagaatgtggtatagtcattcaaaacattttaagtgtctagacctgagagccttgtgggtttaaaaacctgaatgggagaagtaagaaggagaaattaacagtttttcaatttttttcctggagagcagatcaaacagatgatggaggcagcaacacgacaaatcgaggagaggaaaaaacagctgagcttcattagcccccctacacctcaggtattgtgtctagattactctgaacagaataatctttggcacagaatttcttgccatccactcaaaatgagagactagaagaggtgactacatgtttcacttcataatcatctgctacagtctaccatgatgtgtgtgtatatctgtgtgtatgtatgtgtgtttgtctgcctgtcttaattcctctgatttctttttctctatctcacagccaaagactccttcttcctcccaaccagaacgacttcctattggcaacactattcagccctcccaggctgccactttcatgaatgatgccattgagaaggcaaggaaagcagctgaactgcaagctcgaatccaagcccagctggcactgaagccaggactcatcggcaatgccaacatggtgggcctggctaatctccatgccatgggcattgctcccccgtgagtgtctatttcatggaataccttttcatttctgaagtttgagaagcaataaatacctttgaatgttactgatctggctgggcgcagtgcctcaggcctgtaatcgtagcactttgggaggctgaggtaggtggatcacctgaggtcaggagtcaggagttcgagaccagcctggccaatatggtgaaaacccatctctactaaaaatacaaaaattagccaggcgtggtggtgcatgcctgtaatcccagctactcgggaggctgaggcaggagaatcgcttgaacacaggaggcagaggttgcagtgagctgagatcgtgccactgcgtgggtgacagagggagactccggctcaaagaaaacaacaaacaaaatattactgatcctctttttccacagaacctagatcatttctcacagtttcatatttcttaggtgtgattgattaaccagttgaattttttctcgtcttccctgttggagggtttattatcttcttatgatttatataactgagattaaggttattcatctaatgttggagctaggagtatagccaggtttccttcctggtttcaaactcagatttatccattaaaccacattgtgtgagactagatctgaggttcctctgcaactggtcaaagatgttacattttttttagcatctacagttggtctggcatcccatgagtgacataagaattcagggataaggaaagataggattataaattcatataatttataaactcatttcatttggttgtcctgtatactgaaatatccactttgatatttttaatcaagatactattggcagggcgcggtggctcacacctgtaatcccagcactttgggaggccgagactggcagattgcttgagctcaggagttcaagaccagcctaggcaacatggcaaaaccccatctctctaaaatatacaaaaattagccaggcatggtagagcatgcgtgtagttccagctacttaggaggctgaggtgggagaatttctttgggcctgggaggttgaggttgcaatgagctgtgattgtgccactgtactttagcctgggcagcagagtgagaccatgtctcaaaaaaaaagatggtattgctcactgatgagattgttccctagaattattttattgtcctttttgttgttgttgttgttgagagggagtctcactctgtcacccaggctggagtgcagtgatctcggctccctgcaacctctgcctcccaggttcagtagctgggactacaagtgcccgtctaaattttgtattttttgtagagatggggtttcactgtgttgccaaggctggtcttgaactcctgggctcaagccatccacccgcctcagcctcccaaagtgctgggattacagtgtgagccaccacacccgtccatccaaataactcttatagagaaggcactgcagcctcaacttcctgggctcaagtgatcctcctcaacctcctgagtaggtgggaccacaggtatatgccaccgcacccagctaattttaaattttttgttgagatgcagtctccttgtgttggccagactggtctttaactcctgggctcaagtgatccctctgccttggcctcccaaaatgctgtggttccaggcttgagccaccacgcctggctttattttgttttttgcttgccttaatgttccatacaggatttatttctttgcgggctatttttcaggaaggtggagttaaaagaccaaacgaaacctacaccactgatcctggatgagcaagggcgcactgtagatgcaacaggcaaggagattgagctgacacaccgcatgcctactctgaaagccaatattcgtgctgtgaagagggaacaattcaagcaacaactaaaggaaaagccatcagaagacatggaatccaataccttttttgacccccgagtctccattgccccttcccagcgccagagacgcacttttaaattccatgacaagggcaaatttgagaagattgctcagcgattacggacaaaggtatctggcttagagtataacacagaatttggaaaaagttaagaagctgacaagaaaacattgttaaatctctgtgttctaggaaattagataaataggtcatttaaagcagcagtcctcaacctttttggcaccagggacttgtttcatggaagataatttttcccctggagtaaggatggtttcgtgatggttcaagcacatagcatttattgtgtactttattattattatttttttcgagatggagtgtcgctcttgttgcccaggctggagtgcaatggggcgatctcggcttgctgcaacctttgcctcccaggttcaagtgattctcctgcctcagcctcccgagtagctgggatcacaggcatgtgccaccacgcctggctaattttgtatttttggtggagacggggtttctccgtgttggtcaggctggtctcgaactcctgacctcaggtgatctgcccactttgtcctcccaaagtgctgggattacaggcgtgagccaccgcccccgccttttttttttttgggcggggagggggatggagtcttgcactgttacctgggctggagtgcagtggtacagtctcagctcactgcaacctctgcctcctgggttcaagcaattctcctgcctcagcctcctgagtagctgggactgcaggcatgcgccgccatgcctgacgaattttttgtatttttagtagagacagggtttcactatgttggcccggctggtcttaaactcctgaccttgtgatctgcctgccttgacctcccaaagtgctgggattataggcgtgagccactgtgctggcctatttctattattattttattgtaatatatgatgaaataattatataactcaccataatataaaatcactgggagccttgagcttgttttcctgctgaaatggtcccatttgggtgtgatgggagacagtgacagatcatcaggcattagattctcataaggaatgtgcaacatagccccctcacatgtacagttcacaatagggttcgcgctcctctgagaatctcatgccaccgatgatctgacaggaggtggagctcaggccataatgcaggtaatagggagcaatcgtaagtacagatgagactgttggcttgcctgctgctcacctcctgttgtgcagcccagttcctaaaagactgttgggttggggacccctgatttaaagcaatgaatactttgaaaaatgtgctggacaagatggctcaagcctgtaatcccagcgctttgggaggccgaggtgggtggatcacgaggtcaggagttcaagaccagcctgcccaacatggtgaaaccccgtctctactaaaagtacaaaaattaaccgagcgtggtggtgggtgcctgtaatcctagctacttgggaggctgagtcaggagaatcacttgaaactggaaggcagaggttgcagtgagctgagatcgcaccactgcactccagcatgggcaaaagagcgaaactccgtctcaaaaaatatatatatatatttattaatataatacataatttttttagcagattttacttcctaattcgtttctacataagtggaaatattatgaaattgagtttgaaaattctccacatacaactaagtggagggaaacaatttgaaacattctgagtgactaaggaaggcttgcctgtagttaaaatttaatgagacagtacacctggagagttgaattgattgtatattgaatgacctttgccgcctttttatcctctcaaagtgaggttttcataaaattccttttttttttttttttgagacggagtctcgctctgtcacccaggctgcagtgcagtggcacgatctcagctcactgaaagctccgccttccaggttcatgccattctcctgcctcagcctgctgagtagctgggactataggcgcccgccaccacgcccggctaatttttttgtatttttagtagagacggggtttcaccgtgttagccaggatggtctcgatctcctgacctcatgatcctcccgcctcggcctctcaaagtgctgggattacaggcgtgagccaccacacccggccataaaattctatttctgcgtatttactgcaggcatatactgtggagtgcagggaggggttgaaggtgagatctatgtatatgaactaaataaaggataaaataaagcagaacaactcctttctaagctttcagaaattatgaacttgttgcgttaggtgtaaagagttcaacggggaagtgttttaaaatttgggattcttggccgaggtgggcgaatcactaggtcaggagatcgagaccatcctggctaacatggtgaaaccacttctctactaaaaatacaaaaaaatgagccgggcgtggtgatgggcgcctgtagtcccagctactcgggaggctgagtcaggagaatggcgtgaacccgggaggtggagcttacactgcactgcactgcagcctgggtgacagagtgagactccgtctacaaaaaaaaaaaaaaatatttgggattctggccgggcacagtggctcatgcctgtaatcccatcactttgggaggccgaggcgggcagatcacctgaggtcgggagtttgagaccaggctgagcaacgtggagaaaccccatctctactaaaaatacaaaattagctgagggtggtggcacatgcctgtaatcccagctactgaggaggcttaggcaggagaatcgcttaaacctggaaggtagaggttgctgttagccaagaccatgccattgcactccagcctgggcaagaagaacgaaactccgtctcaaaaaaaaaaaaaaattgagattctacacattctgttttctatgactccaatttatctttctgtcttggattatcttgtttttaggctcaactggagaagctacaggcagagatttcacaagcagctcgaaaaacaggcatccatacttcgactaggcttgccctcattgctcctaagaaggagctaaaggaaggagatattcctgaaattgagtggtgggactcttacataatccccaatggctttgatctgtgagtttgttttagtacctttttaaaaaaacagtttttaatcagctgagtttaagactcaagttaataccttttagtaaagctatggttttagtgggaaggatggtactcattcattaattaaaatttttaaatccaagagagataagtaactgtacacaaggtcctgttattttttttttttttttttttgagagggagtctcgctctgtcacccaggctggagtgcagtggcacgatctcagctcactgcaacctccacctcccgggttcaagagattctccttgaattctccttgaatctcagcccctcaagtagctgggactacaggtgtgtgccaccatgcccatctgctttttgtatttttgatagagacagggttttgccatgttggccaggctggtctcgaactcctgacctcaggtgatccgcccaccttagcctcccaaagtgctgggattacaggcgtgagccactgcacctggccaagctcctgcatttgtaagtgatgtatcatatatataggctgtttttagcttttggggttaatgtaggataaccagggacacaatctacaaaagcaaagtctagaattctttttgctctgttacacattgttgcctgtttttagcattattttccttaattacattcttttgctacgtattataggtgtttacatttcctaaagatctcattgtgatagagcaaggattattagttggtaggtgagataatagtaaatatagcatataaggctgggctcggtggctgacacctgttattccagcactttgggaggctgagggctgaaggattgcttgagcccaggagttaaagaccagcttgggcaatatggtgagacctcgtttctacaaagattaaaaaaaaaaaaaaagtagctgggcatggtggcttgtgcctgtagtcctggctacccaggaggctgatgtgagagaatcacttgagcccaggagggtctgtgctgcagtcagctatgatcatgaccactgcactctatcctggacaacagggtgaaactctgtctcaaaaaaaaaaaggatataagacacatttgaagagctttaaatatatctgctccatccattttttttttttttttcctgagacggagtttcgctcttgttgcccaggctggagtgcagtggagcaatcttggttcaccacagcctccgcctcctgggttcaagtgattctcctgcctcagcctcccaagtagctgagattataggcatgcaccaccacgcctggctaatttttggtgtttttagtagagacgaggtttctccatgttggtcaggctggtcccaaattcccgacctcaggtgatccacccgcctcagcctcccaaagggctgggattacaggcatgagccaccacgcctggcgttttttttttttttttttttttttaagacagagtctcactctgttgcacaatctcggctcgctgcaacctctgtctcctgggttgaagcagttcttctagctcagcctcataagtatccgggactacaggcaaataccaccacacctggccagtttttatatttttagtagacaagagtttcactatttggccaaactggtctcaaactcctgacctcaggtgatccacctgccttcatctcccaaagtgctgggattataggcataagccacatcacctggccctgctccatcattctgatacatggctttagtagattttgtcttagcctttcgttgccccttctttgtcagccactgttccagggacttattgtcactaatgagagaacatagcgtctgtcagctgtggcatggtagaaaaaaggttgagaatgattgctgtggagagtgtgttcaaccatagagggactcagttttctcatcatgaaaattatgtgtaatttaactatatattttaggtacctaaatgctattttaggtatatcaagcacaagaacccattatagagagtgggttttttcattgtatttctgagactcctctcttagaatcatctctacccgcatatcgtgttttcttttcttcctacaattttagtacagaggaaaatcccaagagagaagattattttggaatcacaaatcttgttgaacatccagcccagctcaatcctccaggtaatgtatagattcctgaatcaagtctctagagcagcattacccattggaaatttatacagtgaggaacatgttctgtatctatgctgttcaatacaatagccactacccatgtgtaattcttttttttaattcagtttttttcctgacaatagtttgttgtttgaccagtgaacatacattttaagtgcatattcctgtgcttagaatttcatgagacagccaagcatggtggctcatgcctctaatccaaacactttcggaggccaaggcaggaggattgcttgaggccaagaattcaagaccagtctgggcaacacagtgagacccatctcaaggaaaaaaaatttggctgggtatggtggcttatgcctgtaatcactgcactttgggaggctgaggtgggcagattgcttgagctcaggagttcgagatctaggcaacatggcaaaaccccatctctacaaaaaataaaaaatcagccgggcatggtggtgtgcatctgtagtcccagcctcttgggaggctgaggtgtggaggatggcttgagcctgggaggtggaagttgcagtgagctgagatggtgctgctgcactccagcctggatgatactgccagaccttgtctcaaaaaaaaaaaaaaaaaaaaaagaagaaagaaagaaagaaaaaaacccaaaatttcatgaagctttacatttacagttccctggttgttcctaggaaagagccctcagcttgctccttttatagaaccacatgttgttgtggcatccacagctaaatgcaaatgcaagagccaaactcttgggttggtgtgttattagatgcgatatgctccactacccactgtgagggatgctaattccaaagggctttttgttagtttcccaaagttgaaactgggaaacaaagttgcttctattttttttttttttttttttttgaggaggagtttcgctcttgtggtccaggctgcagtgcaacggcatgatctcagctcaccacaacctctgcctcctgggttcaagcaattctcctgcctcagcctcctgagtagctgggattacaggcatgtgccaccacgcccagctaattttgtatttttagtagagacagggtttcaccatgtttggtcaggctggtcttgaactcctgacctcaggtgatctgccagccttggcctcccaaagtgctgggattataggtgtgagccaccgcgcccggccttttttttttttttgagttggagtttcgcttttgtcacccaggctggagtgcaatggcactatctccgttcactgcaactttcacccccctgggttgaagctattctccggccttagcctccggagtagcttggattataggtgcctgccaccacacctggctagtttttgaacttttagtagagacagggttttgccatgttggtcatgcttgtcttgaactcctgacctcaagtgatctgcccacctaggcttcccaaagtgctgggtttaccggcgtgagccaccgcacctggccctaattttgttttctacatttgccaggtatcattgaatgagggggtttaacagcttaaaggaaaacaactaagaacactacttaagaaagataagaggccaggcgaggtggctcatgcctgtaatcccagcactttgggaggccgaggcgggcagatcacgaggtcaagaaatcaacaccatcctggctaacaaggtgaaaccccgtctctactaaaaatacaaaaattagccagacgtggtggcgggtgcctgtagtcccagctactcaggaggctgaggcaggagaatggtgtgaacccaggaggcagagcttgcagtgagctgagattgcgccactgcactccagcctgggcagcagagcgagactccgtctcaacaaaaggaaagataagaatgttttttaaaaacatagccatattgccgggcaccaggcctgaactgattttaatcttactgatcccttattaacgagttttcttcattttctatttaaagtttatacacacacacacacacacacatgttttttgaaatggagtctcgctgtgttgccaggctagagtgcagtggcaagtggcacaatctcggctcactgcaacctccacctcccggattcaagtgattctcctgcctcagcctcccgagtagctgggactacaggtgcgtgccaccacgcccagctaatttttgtatttttagtggagtcagggtttcaccatgttggccaggctggtctcgatctcttgacctcgtgatctgcccacccgtgcctcccaaagtgctgggattacaggtgtgatccaccgcacctggcctcaatatattttttacataaaatgtttataatagagttgggtctcacttggttgtccaggctggtctcgaactcttgggctcacgccatcctcccaccttggcctatcaaagtgctagaattacaggcataagccactgtgtccagcctaaagtttcttttaatgatattgatatttacctaggtttctttaatatttttattgctgtccgggcctggtggctcatgcctggccaacatggtgaaaccccatctctactaaaaatacaaacattagccaggcatggtggcgtgtgcctgtaatcctagctactcgggaggctgaggcaggagaattacttgaacccaggaggcagaggctacagtgagctgagatcgtgccattgcactccaacctgggtgacagagtgagagagagaaaaaaaaaaaatatatatatatatatatgtattcttactgctttggtatactaatatctctgcctgacagttgacaatgacacaccagttactctgggagtatatcttaccaagaaggaacagaaaaaacttcggagacaaacaaggagggaagcacagaaggaactacaagaaaaagtcaggctgggcctgatgcctcctccagaacccaaaggtgcatttctcagtggcctcttctgttaaaaagagtggcaagtttatgtctttaatcctggaggaactttaacatctctgtgtttgagtgatttctgtttctaagaattattcttggggtcctttttctccaagttttctaccatcttttcatattaagataggtcaacacattcattatagaggccatttatggcttatttttaagcatactgatcatacaacactctggttttcctggaagaatacaggtcttgaaattcatggagatagtagttgcagtatttgcgtagactttttatgtacataattcttaatgttttaatttttacaatgaaagtacaggataaaaaacttgaccctgtagttacattctcgttcagcagtattttgactgagcactattatttataagctctttcactagatgctgtgatcagtgtgaaaaatatgaaaggaattaagttccacgtccttcataaattttcagataatgtaaatgcataccaatcttcaacttaattgtgtgaacttctgcaaatgctgaagtgattggatgggattttcaagataggagttattggaggaagtgagtttagagcagagatttgaaataggtaaataatatgaattggtatggaagaaataacaagttactccagctggagaagtgacttcaaagactgattgttgtcctctcttcactgcagtgagaatttctaatttgatgcgagtattaggaacagaagctgttcaagaccccacgaaggtagaagcccacgtcagagctcagatggcaaaaagacagaagtaagtgccatgggattgggtggaaacctcgggcaagtacctttcccaaactcttctggggggtccatatttggagggaggggagagttctccgttgctctctctttccctcagccctgcctctgatcttcaatgcctttctcacttgtggatgtccttcctgtcacgacagagcgcatgaagaggccaacgctgcccgaaaactcacagcagaacagagaaaggtcaagaaaattaaaaagcttaaagaagacatttcacagggggtacacatatctgtatataggtaggtgtccatactgggccaaacttccccttagaattactaaaacattttccaagtgcttgaggcagaatcattgtggcctaaaagcatacctaacaccagttcctactctcttttaatgaccctagtgtggatcaagagctagtaaatcttgtaaaatagcgagagttaatgacttatgtttatggttacccagttcttccctctcaagtcttctttttttttttaccagaatattagttctgaacaagtcaatatacttgttcaggccaagatgtgaactaaagattgtatgtcctttgagaactataaaatatcatcctatttcttttttttttcatctttttttttttaaatggtctgagtttgcttccaacatccatggaagcattacaaattttctttcctccgtagtcatatccttaccctgatgtattgctgtgtttcatcctcactccaaaatgcattttatatgttgtaaatatttttctacctttgtgttgatttaatgtttttattcttttatgttgagtacatgtgtatcttctatttttaaaatgtgcttatttctattaactagttctttattataaaagtggtacattatcacaaaaatagtgaatgcttattaagatttaaaaaattgtctgacaacacagaagaatacttactcaaaatgtctcctttctattctctgatcccttagaaccactctctttaggtaattgctattaacagtttttcacatatcctcctagaaaattttcatgcctatatagtgatcctatatatatattttatttatttatttatttattttgagacggagtttcagtcttgttgcccaggcaggagtgcaatggcgcgatctcagcgcactgcaacctctgcctcccaagttcaagcaattctcctgcctcagcctcctgagtagctaggattacaggcacgcacccccacgcccggctaatttttgtatttttagtagagatggggtttcaccatgttggccaggctggtcttaaactcctgacctcgtgatctgcccactttggcctcccaaagtgctgggattacaggcatgagccaccgcacccagccaagtaatcctatattataagagtctaagggtctagaggacaaaaagtctgtaggtctttacattgtcaagaacaatgagattgtaagtatttttggatgatagtaaatacctctccctgactcttagagtaaactttggttagtaatgtaatggttaatgtaaagtgctagactttgaagaaatgtaagagtgtggaaatatttctagactcatcaactctaccttttaagcattcatctatttgtttactccagaggcctttgtttatagagaggaaaccattttggattcatctttttacttgccactccattcaggcagctgctgatgctaaaatggaagacataactaaactttcccttctccagagttcgaaatttgagcaacccagccaagaagttcaagattgaagccaatgctgggcaactgtacctgacaggggtggtggtactgcacaaggatgtcaacgtggtagtagtggaagggggtgagtctgaaaaacttgagggagactgtccccagacaaccctaggcttagagtgattagcattgtggggagaaaggagaaaaagatcgtattttagtgccatacctgatataatatgctaggtctctgcttctgtgttttttggagtagaaggccctaagatgtggttcctgagattgcttcaactaccacattaatgtctgagctcagaggttctttctaccccatcatcttccacagttctggcaaaattattcttctctgtttccaggccccaaggcccagaagaaatttaagcgtcttatgctgcatcggataaagtgggatgaacagacatctaacacaaagggagatggtgaatgggggttagaggggattaagggggagagctatgggaggtggggatggtgcatctgtccgttcatcttatttcctccctgtgacactcttgataacactagatagtgttcaggaattttagaaagacccgtttagactttgagcctcctagacattcatacaatatttactacatgattatatgcatgaatggtaaagctatttttttgcctatcatttaaggcttttctaccagctggtttctgtgtctgtcctggatctgagtaccggttacatgaatttattcagtatttgaaaattcagcaagcagctaggcatggtggctcatgcctgtaatcctagcactttgggaggctgaggcgggcagattgcctgaggccaggagttcgagaccagcctgggcaaacaacgtggtgaaaccccatatctacaaaaagtacaaaaattagctggatgtggtggcacacacctgtattcccagctactcaggaagctgaggtgggaggatcacttgagcttggggaggtcgaggctgcagtaagctgtgatcgtgccactgcaatccagcctgggtgacagaatgagaccctgtctcaaaaaaaagaaaaagcaaatctagtaagctatacattcatgtgtacagtgtctatattatattattatttgatttttttttttttaaggattgaagccaaaaagatcttcaggtcaaaaaagctctgctttgatcaaactatttcttttgtctgatatatatatatacacacatacacatacatacacacacacacacatacatacacacatgtacacacacatacacatacacacaatacacacacatacatgtacatgtacatactcacacatatgctcttcaacttaatgatggggttagttccaataaacctgagataaattgaaaatattgttaagtcaaaaatgcatttaaggccaggcacggtggctcacacttataatctgagcactttgggaggccgaggcgagcagatcatttgaggtcaggagttcgtaacagcctggccaacatggtgaaaccccgtctctactgaaaacacaaaaattcggggcgtggtggtggacctctgtaatcccagctactcgggaggctgaggcaggagaatcgcttgaacctggcaggcggaggttgcagtaagctgtgatcgcaccactgcactgcagcctaagcgacagagcaagactccatctcaaaaaaaaaaaaatgcatttaatacatctgacctacaggacatcataacagcctagccttccttatactttctcagaatacttagattagcctacagttgggcaaaatcatctaacacaaagcctatttttatctcatgtaagagtattttactgcatattgctagcccaggaaaatctcaaaatttaaaatttgaagtacattttctactaaatatttatcactttcacactatactcaaggcaaaaaattgtaagtcaaggactgtctgtctatatttgaaggccagacattcttctggccatcatactcccattagtgttcattcttctcatctttgaacacctggattagcatttaaaatctgcagagaggcctggtgtgatggcttatgcctgtaatcccagcactttgggaggccgaggcgggtggatcacctgaggtcaggagtttgagaccagcctgacatggtgaaaccccgtctctactaaaaaatacaaaaatgagctgggcgtggcagcgtgcgcctgtaatcccagctactcgggaggcctaggcaggagaatcacttgaacccaggaagcggttgcagtgagctgagatcataccacttcactccagcctgagtgacagagcaagactccgtctcaaaaaaataaaaatataaataaaatctgcagagagttcatcttaagatacctgagaataaaaaatattttgttctacacgtgcatttttttttttttttttttgagatggagtctttgctcttttgcccaggctggagtgcagtggcaccatcttggctcactgcagcctccgcctcccaggttcaagtgattctcctgcctcggcctcctgataagctcggattacaggcacctgccaccacacctggctaatttttgtatttttagtagagatgaggtttcgccatgttggctaggctggtctcaaactcttgacctcaggtgatccactcacctcagcctcccaaagcgctaggattacaggcgtgagccaccacgctggccgataattttgatttggtatatctgccctcctcctccattgggtgaaagttttttgagagtaatatatgatgttgacatatgaagcctgcctcccaaagtgcctaggacaagtttttattcttgactgcttgtcttttatttccttattcccagtacctggtggagctcttgattcataacaagtgctatgtaaatgctaattgtatcaattaatattactgcctacttggagcttcaagtctaatttggggaaaataaagagcaacagaaaagagaacacttggtccaacacataaaaagggtgataatattttagagagtttgggtagacttgaatattatttgtttagaacctgaatctcaagtctaagtctgtaacaagatttctcttccagatgatgaggagtctgatgaggaagctgtgaagaaaaccaacaaatgtgtactagtctgggaggtaggtgatcctttgtaaaacattgtaaaactttagccaactcctgaatatttatactatttgagtggagcaatggaatgtaagatgtaatcagtgaataatgttttaaataatttatgtttctttttggaatccatttttaaatggttggcagtaaattcttcctgatcatctgtttaattaaattcgtgagtatttagtatatgctatctggggaagtgcgtggacagtgctgctggtagcaggaatacaaattctctaccgaaaattatttatttcacagtcatgaatatgagacttggaaacgggaatgaattgttgttggatttacctttggatatagtgaaggaagtactagacttaagaatataaagttaggaggctgggcagtgctgcttattagctgtgcaatctgggcaagacacttaatgtcaaattctgttgccttagctattgttctctatattgtcaagtttttgagaatgaaattagataattatgtgatagtgcttcataaaatgtgactgaatcactcttcaagtggaatattttttatggttatctagttctttaacccctgaagccttcttagagaaccagtattaaaaccagtattaatgttttcatgtttgcttttaggtatagtacatgtatatctttttttgggggcgggggggcggggggcggtatggagtttcgctcttgttgctcttgttgcccaggctggagtgcgatggcgtgatctcggctcaccgcaacctctacctcccaggttcaaacgattctcctgcctcagcctcccaagtagctgggattacaggtgcacgccaccatgcccgactaatttttgtatttatagtagagacagggtttctccatgttggtcaggctggtcttgaactcccaacctcaggtgatccgcctgcctcggcctcccaaagtgctgggattacaggcatgagccactgtgcccagcccctccatttctttttttttttttttgagagagttttgcccttgttacccaggctggagtgcaatggtgcaatctcagctcaccgcaaccaccgcctcctgggttcaagtgattctcctgcctcggcctcccgagtagctggaattacaggcatgagccaccacgcctggctaattttgtatttttagtagagacggggtttcgccatattggtcaagctggtctcgaactcctgacctgaggtccgactgccttggcctcccaaagtgctgggattacaggcatgagtcactgcgcccggccatatatcttctatttttaaaatgtgcttatttctagtatatgtgctgctgaagcgagcagtaaaatgtgcttatttctattaatgaattctttattataaaagtggtacattattacaaaagtagtaaatgtttattaagattagaaacaaattctaattatacagaagagtacttactgagacccagcacagtggctcacgcctataatcccagcactttgggaggatgaggtggttggatcacttgagctcaggagttcaagaccagcctgggcaatatggcgaaaccccgtctctacaaaaaatacaaaaattagcctggcctggtggcgtctgcctgtagtcccagctacttgagaggctgaggtgggaagattgcttcagctttggagtttgaagctgcagtgagctgtgactatgccactgcactccagcctgggcaccagagtgaaaccctgtcttaaaaaaaaaaaagaaaaagtctcaggccaggtgcagtggctcatgcctatactcccaacactttgggaggctgaggtgggcggattacgaggtcaggaattcgagactaacctggccaacatggtgaaacccagtctctactaaaaatacaaaaattagtggggcgtggtggccagtgcctataatcccagctacttgggaggctgaggcaggagaatcgcttgaatctgggaagcggaggttgcagtgagccgagatcgcaccattgcactccagcctgggtgacagtgcgagactgtgtctcaaaacaaaagtctcttcctattcgctgatctcttcagaccagtctttataggtaattgctattaatagtttttcttctgaaggagcaatcaaaaaataaaaattaaaaaaaaaggttttcatgtatcctgccttatcccagattcttcaatttatgcatacaaattagatgataataaccatagtatttgttctctgttttataagttcccacctgcatatttgttatctttttttaatcaacttttttttttagagatagggtcttgctctattgctcaggctggtgtgcagtggcgcagtcatagctcgctacagccttgaactcctagggacaagcaatcctccagtctcagcttctcaagtatctgagacctcaggtccacaccactgtgcctggctaattttttttttttttttttttttttttagaaatggatctcactatgttgcctaggcttgtcttgaactcttagccttgagtgatcctcccacctcagcctcccaaagtgctgggattataggcatgagctactgtgcccagccctaccttcacatatctcagcaccctcatctttcaattttcttctatttatctctgaagagtacttactgaaaaagtcccggcttcttagagaaccagtattaatgttgtaggaatttagttttcaggaattgtctctcatgttcagaaataagccaagttctgctccagcctccttattggagtctactccctgaacgcctcttgaggtattgctttatgactgccattgctgctggtaactttggcaagaatgccattctgcccagtactgtctttttctgttgtaattctctgctggtacctgctcttcttctgttccccgcccccagttgttctttgttgctgggccccaaagcctcctgcttatataaatagtttctggggcctttttgaaggctcagatttagtccttaaggcctggtaggagataagtttatctcattccaccttccatagttcttcctgacttgctgttccacccaggcaccagagcaaataattcctcacttcatttcaaaaaactaaaagccttatgcatatgaattcgtaaaatctcatacaaatatccaaggaggccgggcgcggtggctcacgcctataatcccagcactttgggaggctgaggcgggaggatcacgaggtcaggagatcgagaccatcctggctaacacggtgaaaccccgtctctactagaaatacaaaaaatcagctgggcgtggtagcgggcgcctgtagtcccagctactccagaggctgaggcaggagaatggtgtgaacccgggaggcggagcttgcagtgagccgagatcgtgccactgcactccagcctgggcgacagagcgagactctgtctcagaaaaacacaaatatccaaggaaatggaggtcacaatttttttttaaccataaaatcacgttcagctgggcacatgtctcacaaatgttactaggtcttcttataaaagaatattatctgatttaaataagaaattgaagtgtttttattatatatctcttttctagggtacagccaaagaccggagctttggagagatgaagtttaaacagtgtcctacagagaacatggctcgtgagcatttcaaaaagcatggggctgaacactactgggaccttgcgctgagtgaatctgtgttagagtccactgattgagactactgcaagcccttgcctctcctcccttgcctttgtctcttcagtcctctcacttattctatttcccaaccccctcccacttgtttgtgtgatctcagaactgtgccaagcagacactgggacaaagggagaatatcttgctcccctcctgagtcagcctggtgttgccctttattccccttatgtgcatatgattaaagagttatttttaaa

SEQ ID NO: 13592 - DNA, 2595 bp, Homo sapiens
tggggattactgaagaagaaagagaaagcccctgtcctggaagagcttagacttagttgggaaaactatactaacattgaaatacttaacacttggcaaacagaatatcaacaatgtaatttaacctaatatgaaccaagctcttacacgctaagagaatgtgaaacaaaagtttaatcagagtgggataggttataatgaggaaaacttcttggaggaggtgagttttaggcaggatttggaacaggggttgtggaaaagttgagagaaatcattataaatgtgagcagtagcatttgcaaagaccttgagatgggaacatttataagaacatgggaatgaaatttgtttgactggattaggagaatgttgaagttgggtgagatggagagtctagtagaccctgcttctggcaggtggctatttgcaaggttgtgtcatattcccctgggaatagccagaaaatgctggtaggggctaggataattcttcccttctccccacggggagggatacagcttttctttcatcttgggttcccttaggaggtgtttggtgatgactctgagatctctaaagaatcatcaggagtaaagaagcgacgaataccccgttttgaggaggtggaagaagagccagaggtgatccctgggcctccatcagagagccctggcatgctgactaagctccagatcaaacagatgatggaggcagcaacacgacaaatcgaggagaggaaaaaacagctgagcttcattagcccccctacacctcagccaaagactccttcttcctcccaaccagaacgacttcctattggcaacactattcagccctcccaggctgccactttcatgaatgatgccattgagaaggcaaggaaagcagctgaactgcaagctcgaatccaagcccagctggcactgaagccaggactcatcggcaatgccaacatggtgggcctggctaatctccatgccatgggcattgctcccccgaaggtggagttaaaagaccaaacgaaacctacaccactgatcctggatgagcaagggcgcactgtagatgcaacaggcaaggagattgagctgacacaccgcatgcctactctgaaagccaatattcgtgctgtgaagagggaacaattcaagcaacaactaaaggaaaagccatcagaagacatggaatccaataccttttttgacccccgagtctccattgccccttcccagcgccagagacgcacttttaaattccatgacaagggcaaatttgagaagattgctcagcgattacggacaaaggctcaactggagaagctacaggcagagatttcacaagcagctcgaaaaacaggcatccatacttcgactaggcttgccctcattgctcctaagaaggagctaaaggaaggagatattcctgaaattgagtggtgggactcttacataatccccaatggctttgatcttacagaggaaaatcccaagagagaagattattttggaatcacaaatcttgttgaacatccagcccagctcaatcctccagttgacaatgacacaccagttactctgggagtatatcttaccaagaaggaacagaaaaaacttcggagacaaacaaggagggaagcacagaaggaactacaagaaaaagtcaggctgggcctgatgcctcctccagaacccaaagtgagaatttctaatttgatgcgagtattaggaacagaagctgttcaagaccccacgaaggtagaagcccacgtcagagctcagatggcaaaaagacagaaccctgcctctgatcttcaatgcctttctcacttgtggatgtccttcctgtcacgacagagcgcatgaagaggccaacgctgcccgaaaactcacagcagaacagagaaaggtcaagaaaattaaaaagcttaaagaagacatttcacagggggtacacatatctgtatatagagttcgaaatttgagcaacccagccaagaagttcaagattgaagccaatgctgggcaactgtacctgacaggggtggtggtactgcacaaggatgtcaacgtggtagtagtggaagggggccccaaggcccagaagaaatttaagcgtcttatgctgcatcggataaagtgggatgaacagacatctaacacaaagggagatgatgatgaggagtctgatgaggaagctgtgaagaaaaccaacaaatgtgtactagtctgggagggtacagccaaagaccggagctttggagagatgaagtttaaacagtgtcctacagagaacatggctcgtgagcatttcaaaaagcatggggctgaacactactgggaccttgcgctgagtgaatctgtgttagagtccactgattgagactactgcaagcccttgcctctcctcccttgcctttgtctcttcagtcctctcacttattctatttcccaaccccctcccacttgtttgtgtgatctcagaactgtgccaagcagacactgggacaaagggagaatatcttgctcccctcctgagtcagcctggtgttgccctttattccccttatgtgcatatgattaaagagttatttttaaa

SEQ ID NO: 13593 - DNA, 5228 bp, Homo sapiens
aagaaatggattttttttgtgtgtgtgtgtgagatgttctctctgtcactcaggctggagcgcagtggtgcgatctcggttcactgcagcctctgcctcccaggttcaagtgattctcctgcctcagcctcctaagtagctgggattataggcatgtgccaccacgcacggctaatttttgtatttttagtagagacagggtttcaccatgttgaccaggctggtctggaactcctgacctcaagtgatctgcctaccttggcctcccaaattgctgggattataggcgtgagccaccgtacctagcctgtttttgtttttcaggcaaggtctcacttttttgtccaggctggagttcagtggcgagatcttggcttactgcaacctctgcctcccgggcttgagtgatcctcccaccttggcttcccaagtagctgggactacaggtcaccatgcctggctgatttttgtattttttttaaagattgagttccaccatgttgcccaggctggtcttgaactcctgggctgaaatgatcctcctgcctcagcctcccaaagtgctggacttacaggcgtgagctaccacgcccagccaattattttcttttttggggggtgggggatggagtcttgctctgtcacttaggctggagtacggtggcgcgttctcggctcactgcaacctctgcctcccgggttcacgccattctcctgcctcagcctcctgagtagctgggactacaggtatgtaccaccatgcccgactaattttttgtatttttagtagagatggggtttcaccatgttagccaggatggtcttgatctcctgacctcgtgatccacccgcctcggcctcccaaagtgctgggattacaggcatgagccaccgtgccaggcccaatgatgttttttatggagaatggggatggacgtattcacaacatatccttttgttatgtttctttcttttttttttttgagacggagtctcactctgtcgcccagagtggagtgtaatggcgctatctcggctcactgcaacctccgcctcccgggttcaagctattcttctgcctcagtcccttgagtagctgggattacaggcacgcgccaccacgcctagctaatttttttgtatgtttagtagagacggggtttcaccatgttggtcaggctggtctcgaactcctgacctcgtgatccgcccggctcggcctcccaaagtgctgggattacagacgtgagctgccaggcccagcctgtaatttttcattttattttattttattttttgagacggagtctcgctcttgcactgttgcctaggctggagtgcaatgccgtgatctcagctcactgcaacgtccgcctcctgggttccagcagttctcctgcctcagcctcctgagtagctgagattacagaacgtgcatcaccatgtccagctaatttttgtatttttagtagagatggggtttcaccctgttagccaggatggtctcgatctcctgacctcgtgatccacctgcctcagcctcccaaagtattgggattacaggcgtgagccaccacgcccagccctgtaatttttaatttttttattttctttctttctttacttatttagagatggagtctccccctgttgtccaggctggagtgcagtggcatgatcttggctcactgtaacctccaccttctggattcaagcgcttctcctgcctcagcctcctgagtagctggcattacaggcgcccaccaccacacccggctaatttttgtatttttactagagacggtgtttcaccatgttagccaggctggtcttcagctcctgacctcaagtgattcgcccacctcagcctctcaaagtgctgggattacaggcgtgagccaccatgcctgacccttccgtaatttttgaattttgaatatatcacctattcaagaaaaaatgttaaagacaaatgtttaaaaatatcttgaagcagtttaagaacaggtctgttttgcaaaatgtaagaggagttgtttggccataccctcaaagcttatcattctgaacttctttaggacagaaggggtttatagagactagggagcaggtctttgcaccatcgtctcttgtttcccaaactagtagttcaagtactaatatcatgattttttaaaaaaaattaagtataggctgggtgcggtggctcacacctgtaatcccagcactttgagaggccgaggtgggcggatcacgaggtcaggagatcgagaccatcctggctaacagggtgaaaccccatctctactaaaaatacaaaaaattagccgggcgtggtggtgggcgcctatagtcccagctactcgggatgctgaggcaggagaatggcatgaacccgggaggcagagcttgcagtgagccaagatcgcaccactgcactccagcctgagtgacagagcgagactccatctcaaaaaaaaaaaagaaaattaagtataatattttgtgtaggttctgttaggtttgcatgcattatttaagtggttaacactagacctgtaaggtaggtactgttttcttcccccttctagacacttaggaggtttagagactaagttccttatccaagataacaaaggcattaagtggcagagttaagattcaaactcaggtttctctgactccagagtctcaatcatcacactatattactacctaatatgctaatcttgctttaggaacatgggttgaaaaattccagtgctcacttatcttgactaaattttttgcactgtggtgcaggcagaatgtggtatagtcattcaaaacattttaagtgtctagacctgagagccttgtgggtttaaaaacctgaatgggagaagtaagaaggagaaattaacagtttttcaatttttttcctggagagcagatcaaacagatgatggaggcagcaacacgacaaatcgaggagaggaaaaaacagctgagcttcattagcccccctacacctcaggtattgtgtctagattactctgaacagaataatctttggcacagaatttcttgccatccactcaaaatgagagactagaagaggtgactacatgtttcacttcataatcatctgctacagtctaccatgatgtgtgtgtatatctgtgtgtatgtatgtgtgtttgtctgcctgtcttaattcctctgatttctttttctctatctcacagccaaagactccttcttcctcccaaccagaacgacttcctattggcaacactattcagccctcccaggctgccactttcatgaatgatgccattgagaaggcaaggaaagcagctgaactgcaagctcgaatccaagcccagctggcactgaagccaggactcatcggcaatgccaacatggtgggcctggctaatctccatgccatgggcattgctcccccgtgagtgtctatttcatggaataccttttcatttctgaagtttgagaagcaataaatacctttgaatgttactgatctggctgggcgcagtgcctcaggcctgtaatcgtagcactttgggaggctgaggtaggtggatcacctgaggtcaggagtcaggagttcgagaccagcctggccaatatggtgaaaacccatctctactaaaaatacaaaaattagccaggcgtggtggtgcatgcctgtaatcccagctactcgggaggctgaggcaggagaatcgcttgaacacaggaggcagaggttgcagtgagctgagatcgtgccactgcgtgggtgacagagggagactccggctcaaagaaaacaacaaacaaaatattactgatcctctttttccacagaacctagatcatttctcacagtttcatatttcttaggtgtgattgattaaccagttgaattttttctcgtcttccctgttggagggtttattatcttcttatgatttatataactgagattaaggttattcatctaatgttggagctaggagtatagccaggtttccttcctggtttcaaactcagatttatccattaaaccacattgtgtgagactagatctgaggttcctctgcaactggtcaaagatgttacattttttttagcatctacagttggtctggcatcccatgagtgacataagaattcagggataaggaaagataggattataaattcatataatttataaactcatttcatttggttgtcctgtatactgaaatatccactttgatatttttaatcaagatactattggcagggcgcggtggctcacacctgtaatcccagcactttgggaggccgagactggcagattgcttgagctcaggagttcaagaccagcctaggcaacatggcaaaaccccatctctctaaaatatacaaaaattagccaggcatggtagagcatgcgtgtagttccagctacttaggaggctgaggtgggagaatttctttgggcctgggaggttgaggttgcaatgagctgtgattgtgccactgtactttagcctgggcagcagagtgagaccatgtctcaaaaaaaaagatggtattgctcactgatgagattgttccctagaattattttattgtcctttttgttgttgttgttgttgagagggagtctcactctgtcacccaggctggagtgcagtgatctcggctccctgcaacctctgcctcccaggttcagtagctgggactacaagtgcccgtctaaattttgtattttttgtagagatggggtttcactgtgttgccaaggctggtcttgaactcctgggctcaagccatccacccgcctcagcctcccaaagtgctgggattacagtgtgagccaccacacccgtccatccaaataactcttatagagaaggcactgcagcctcaacttcctgggctcaagtgatcctcctcaacctcctgagtaggtgggaccacaggtatatgccaccgcacccagctaattttaaattttttgttgagatgcagtctccttgtgttggccagactggtctttaactcctgggctcaagtgatccctctgccttggcctcccaaaatgctgtggttccaggcttgagccaccacgcctggctttattttgttttttgcttgccttaatgttccatacaggatttatttctttgcgggctatttttcaggaaggtggagttaaaagaccaaacgaaacctacaccactgatcct

SEQ ID NO: 13594 - DNA, 1097 bp, Homo sapiens
aagaaatggattttttttgtgtgtgtgtgtgagatgttctctctgtcactcaggctggagcgcagtggtgcgatctcggttcactgcagcctctgcctcccaggttcaagtgattctcctgcctcagcctcctaagtagctgggattataggcatgtgccaccacgcacggctaatttttgtatttttagtagagacagggtttcaccatgttgaccaggctggtctggaactcctgacctcaagtgatctgcctaccttggcctcccaaattgctgggattataggcgtgagccaccgtacctagcctgtttttgtttttcaggcaaggtctcacttttttgtccaggctggagttcagtggcgagatcttggcttactgcaacctctgcctcccgggcttgagtgatcctcccaccttggcttcccaagtagctgggactacaggtcaccatgcctggctgatttttgtattttttttaaagattgagttccaccatgttgcccaggctggtcttgaactcctgggctgaaatgatcctcctgcctcagcctcccaaagtgctggacttacaggcgtgagctaccacgcccagccaattattttcttttttggggggtgggggatggagtcttgctctgtcacttaggctggagtacggtggcgcgttctcggctcactgcaacctctgcctcccgggttcacgccattctcctgcctcagcctcctgagtagctgggactacagatcaaacagatgatggaggcagcaacacgacaaatcgaggagaggaaaaaacagctgagcttcattagcccccctacacctcagccaaagactccttcttcctcccaaccagaacgacttcctattggcaacactattcagccctcccaggctgccactttcatgaatgatgccattgagaaggcaaggaaagcagctgaactgcaagctcgaatccaagcccagctggcactgaagccaggactcatcggcaatgccaacatggtgggcctggctaatctccatgccatgggcattgctcccccgaaggtggagttaaaagaccaaacgaaacctacaccactgatcct

SEQ ID NO: 13595 - DNA, 4512 bp, Homo sapiens
aactcttgacctcaggtgatccactcacctcagcctcccaaagcgctaggattacaggcgtgagccaccacgctggccgataattttgatttggtatatctgccctcctcctccattgggtgaaagttttttgagagtaatatatgatgttgacatatgaagcctgcctcccaaagtgcctaggacaagtttttattcttgactgcttgtcttttatttccttattcccagtacctggtggagctcttgattcataacaagtgctatgtaaatgctaattgtatcaattaatattactgcctacttggagcttcaagtctaatttggggaaaataaagagcaacagaaaagagaacacttggtccaacacataaaaagggtgataatattttagagagtttgggtagacttgaatattatttgtttagaacctgaatctcaagtctaagtctgtaacaagatttctcttccagatgatgaggagtctgatgaggaagctgtgaagaaaaccaacaaatgtgtactagtctgggaggtaggtgatcctttgtaaaacattgtaaaactttagccaactcctgaatatttatactatttgagtggagcaatggaatgtaagatgtaatcagtgaataatgttttaaataatttatgtttctttttggaatccatttttaaatggttggcagtaaattcttcctgatcatctgtttaattaaattcgtgagtatttagtatatgctatctggggaagtgcgtggacagtgctgctggtagcaggaatacaaattctctaccgaaaattatttatttcacagtcatgaatatgagacttggaaacgggaatgaattgttgttggatttacctttggatatagtgaaggaagtactagacttaagaatataaagttaggaggctgggcagtgctgcttattagctgtgcaatctgggcaagacacttaatgtcaaattctgttgccttagctattgttctctatattgtcaagtttttgagaatgaaattagataattatgtgatagtgcttcataaaatgtgactgaatcactcttcaagtggaatattttttatggttatctagttctttaacccctgaagccttcttagagaaccagtattaaaaccagtattaatgttttcatgtttgcttttaggtatagtacatgtatatctttttttgggggcgggggggcggggggcggtatggagtttcgctcttgttgctcttgttgcccaggctggagtgcgatggcgtgatctcggctcaccgcaacctctacctcccaggttcaaacgattctcctgcctcagcctcccaagtagctgggattacaggtgcacgccaccatgcccgactaatttttgtatttatagtagagacagggtttctccatgttggtcaggctggtcttgaactcccaacctcaggtgatccgcctgcctcggcctcccaaagtgctgggattacaggcatgagccactgtgcccagcccctccatttctttttttttttttttgagagagttttgcccttgttacccaggctggagtgcaatggtgcaatctcagctcaccgcaaccaccgcctcctgggttcaagtgattctcctgcctcggcctcccgagtagctggaattacaggcatgagccaccacgcctggctaattttgtatttttagtagagacggggtttcgccatattggtcaagctggtctcgaactcctgacctgaggtccgactgccttggcctcccaaagtgctgggattacaggcatgagtcactgcgcccggccatatatcttctatttttaaaatgtgcttatttctagtatatgtgctgctgaagcgagcagtaaaatgtgcttatttctattaatgaattctttattataaaagtggtacattattacaaaagtagtaaatgtttattaagattagaaacaaattctaattatacagaagagtacttactgagacccagcacagtggctcacgcctataatcccagcactttgggaggatgaggtggttggatcacttgagctcaggagttcaagaccagcctgggcaatatggcgaaaccccgtctctacaaaaaatacaaaaattagcctggcctggtggcgtctgcctgtagtcccagctacttgagaggctgaggtgggaagattgcttcagctttggagtttgaagctgcagtgagctgtgactatgccactgcactccagcctgggcaccagagtgaaaccctgtcttaaaaaaaaaaaagaaaaagtctcaggccaggtgcagtggctcatgcctatactcccaacactttgggaggctgaggtgggcggattacgaggtcaggaattcgagactaacctggccaacatggtgaaacccagtctctactaaaaatacaaaaattagtggggcgtggtggccagtgcctataatcccagctacttgggaggctgaggcaggagaatcgcttgaatctgggaagcggaggttgcagtgagccgagatcgcaccattgcactccagcctgggtgacagtgcgagactgtgtctcaaaacaaaagtctcttcctattcgctgatctcttcagaccagtctttataggtaattgctattaatagtttttcttctgaaggagcaatcaaaaaataaaaattaaaaaaaaaggttttcatgtatcctgccttatcccagattcttcaatttatgcatacaaattagatgataataaccatagtatttgttctctgttttataagttcccacctgcatatttgttatctttttttaatcaacttttttttttagagatagggtcttgctctattgctcaggctggtgtgcagtggcgcagtcatagctcgctacagccttgaactcctagggacaagcaatcctccagtctcagcttctcaagtatctgagacctcaggtccacaccactgtgcctggctaattttttttttttttttttttttttttagaaatggatctcactatgttgcctaggcttgtcttgaactcttagccttgagtgatcctcccacctcagcctcccaaagtgctgggattataggcatgagctactgtgcccagccctaccttcacatatctcagcaccctcatctttcaattttcttctatttatctctgaagagtacttactgaaaaagtcccggcttcttagagaaccagtattaatgttgtaggaatttagttttcaggaattgtctctcatgttcagaaataagccaagttctgctccagcctccttattggagtctactccctgaacgcctcttgaggtattgctttatgactgccattgctgctggtaactttggcaagaatgccattctgcccagtactgtctttttctgttgtaattctctgctggtacctgctcttcttctgttccccgcccccagttgttctttgttgctgggccccaaagcctcctgcttatataaatagtttctggggcctttttgaaggctcagatttagtccttaaggcctggtaggagataagtttatctcattccaccttccatagttcttcctgacttgctgttccacccaggcaccagagcaaataattcctcacttcatttcaaaaaactaaaagccttatgcatatgaattcgtaaaatctcatacaaatatccaaggaggccgggcgcggtggctcacgcctataatcccagcactttgggaggctgaggcgggaggatcacgaggtcaggagatcgagaccatcctggctaacacggtgaaaccccgtctctactagaaatacaaaaaatcagctgggcgtggtagcgggcgcctgtagtcccagctactccagaggctgaggcaggagaatggtgtgaacccgggaggcggagcttgcagtgagccgagatcgtgccactgcactccagcctgggcgacagagcgagactctgtctcagaaaaacacaaatatccaaggaaatggaggtcacaatttttttttaaccataaaatcacgttcagctgggcacatgtctcacaaatgttactaggtcttcttataaaagaatattatctgatttaaataagaaattgaagtgtttttattatatatctcttttctagggtacagccaaagaccggagctttggagagatgaagtttaaacagtgtcctacagagaacatggctcgtgagcatttcaaaaagcatggggctgaacactactgggaccttgcgctgagtgaatctgtgttagagtccactgattgagactactgcaagcccttgcctctcctcccttgcctttgtctcttcagtcctctcacttattctatttcccaaccccctcccacttgtttgtgtgatctcagaactgtgccaagcagacactgggacaaagggagaatatcttgctcccctcctgagtcagcctggtgttgccctttattccccttatgtgcatatgattaaagagttatttttaaa

SEQ ID NO: 13596 - DNA, 898 bp, Homo sapiens
aactcttgacctcaggtgatccactcacctcagcctcccaaagcgctaggattacaggcgtgagccaccacgctggccgataattttgatttggtatatctgccctcctcctccattgggtgaaagttttttgagagtaatatatgatgttgacatatgaagcctgcctcccaaagtgcctaggacaagtttttattcttgactgcttgtcttttatttccttattcccagtacctggtggagctcttgattcataacaagtgctatgtaaatgctaattgtatcaattaatattactgcctacttggagcttcaagtctaatttggggaaaataaagagcaacagaaaagagaacacttggtccaacacataaaaagggtgataatattttagagagtttgggtagacttgaatattatttgtttagaacctgaatctcaagtctaagtctgtaacaagatttctcttccagatgatgaggagtctgatgaggaagctgtgaagaaaaccaacaaatgtgtactagtctgggagggtacagccaaagaccggagctttggagagatgaagtttaaacagtgtcctacagagaacatggctcgtgagcatttcaaaaagcatggggctgaacactactgggaccttgcgctgagtgaatctgtgttagagtccactgattgagactactgcaagcccttgcctctcctcccttgcctttgtctcttcagtcctctcacttattctatttcccaaccccctcccacttgtttgtgtgatctcagaactgtgccaagcagacactgggacaaagggagaatatcttgctcccctcctgagtcagcctggtgttgccctttattccccttatgtgcatatgattaaagagttatttttaaa

SEQ ID NO: 13597 - DNA, 3670 bp, Homo sapiens
ggggtttcaccatgttggccaggctggtcttaaactcctgacctcgtgatctgcccactttggcctcccaaagtgctgggattacaggcatgagccaccgcacccagccaagtaatcctatattataagagtctaagggtctagaggacaaaaagtctgtaggtctttacattgtcaagaacaatgagattgtaagtatttttggatgatagtaaatacctctccctgactcttagagtaaactttggttagtaatgtaatggttaatgtaaagtgctagactttgaagaaatgtaagagtgtggaaatatttctagactcatcaactctaccttttaagcattcatctatttgtttactccagaggcctttgtttatagagaggaaaccattttggattcatctttttacttgccactccattcaggcagctgctgatgctaaaatggaagacataactaaactttcccttctccagagttcgaaatttgagcaacccagccaagaagttcaagattgaagccaatgctgggcaactgtacctgacaggggtggtggtactgcacaaggatgtcaacgtggtagtagtggaagggggtgagtctgaaaaacttgagggagactgtccccagacaaccctaggcttagagtgattagcattgtggggagaaaggagaaaaagatcgtattttagtgccatacctgatataatatgctaggtctctgcttctgtgttttttggagtagaaggccctaagatgtggttcctgagattgcttcaactaccacattaatgtctgagctcagaggttctttctaccccatcatcttccacagttctggcaaaattattcttctctgtttccaggccccaaggcccagaagaaatttaagcgtcttatgctgcatcggataaagtgggatgaacagacatctaacacaaagggagatggtgaatgggggttagaggggattaagggggagagctatgggaggtggggatggtgcatctgtccgttcatcttatttcctccctgtgacactcttgataacactagatagtgttcaggaattttagaaagacccgtttagactttgagcctcctagacattcatacaatatttactacatgattatatgcatgaatggtaaagctatttttttgcctatcatttaaggcttttctaccagctggtttctgtgtctgtcctggatctgagtaccggttacatgaatttattcagtatttgaaaattcagcaagcagctaggcatggtggctcatgcctgtaatcctagcactttgggaggctgaggcgggcagattgcctgaggccaggagttcgagaccagcctgggcaaacaacgtggtgaaaccccatatctacaaaaagtacaaaaattagctggatgtggtggcacacacctgtattcccagctactcaggaagctgaggtgggaggatcacttgagcttggggaggtcgaggctgcagtaagctgtgatcgtgccactgcaatccagcctgggtgacagaatgagaccctgtctcaaaaaaaagaaaaagcaaatctagtaagctatacattcatgtgtacagtgtctatattatattattatttgatttttttttttttaaggattgaagccaaaaagatcttcaggtcaaaaaagctctgctttgatcaaactatttcttttgtctgatatatatatatacacacatacacatacatacacacacacacacatacatacacacatgtacacacacatacacatacacacaatacacacacatacatgtacatgtacatactcacacatatgctcttcaacttaatgatggggttagttccaataaacctgagataaattgaaaatattgttaagtcaaaaatgcatttaaggccaggcacggtggctcacacttataatctgagcactttgggaggccgaggcgagcagatcatttgaggtcaggagttcgtaacagcctggccaacatggtgaaaccccgtctctactgaaaacacaaaaattcggggcgtggtggtggacctctgtaatcccagctactcgggaggctgaggcaggagaatcgcttgaacctggcaggcggaggttgcagtaagctgtgatcgcaccactgcactgcagcctaagcgacagagcaagactccatctcaaaaaaaaaaaaatgcatttaatacatctgacctacaggacatcataacagcctagccttccttatactttctcagaatacttagattagcctacagttgggcaaaatcatctaacacaaagcctatttttatctcatgtaagagtattttactgcatattgctagcccaggaaaatctcaaaatttaaaatttgaagtacattttctactaaatatttatcactttcacactatactcaaggcaaaaaattgtaagtcaaggactgtctgtctatatttgaaggccagacattcttctggccatcatactcccattagtgttcattcttctcatctttgaacacctggattagcatttaaaatctgcagagaggcctggtgtgatggcttatgcctgtaatcccagcactttgggaggccgaggcgggtggatcacctgaggtcaggagtttgagaccagcctgacatggtgaaaccccgtctctactaaaaaatacaaaaatgagctgggcgtggcagcgtgcgcctgtaatcccagctactcgggaggcctaggcaggagaatcacttgaacccaggaagcggttgcagtgagctgagatcataccacttcactccagcctgagtgacagagcaagactccgtctcaaaaaaataaaaatataaataaaatctgcagagagttcatcttaagatacctgagaataaaaaatattttgttctacacgtgcatttttttttttttttttttgagatggagtctttgctcttttgcccaggctggagtgcagtggcaccatcttggctcactgcagcctccgcctcccaggttcaagtgattctcctgcctcggcctcctgataagctcggattacaggcacctgccaccacacctggctaatttttgtatttttagtagagatgaggtttcgccatgttggctaggctggtctcaaactcttgacctcaggtgatccactcacctcagcctcccaaagcgctaggattacaggcgtgagccaccacgctggccgataattttgatttggtatatctgccctcctcctccattgggtgaaagttttttgagagtaatatatgatgttgacatatgaagcctgcctcccaaagtgcctaggacaagtttttattcttgactgcttgtcttttatttccttattcccagtacctggtggagctcttgattcataacaagtgctatgtaaatgctaattgtatcaattaatattactgcctacttggagcttcaagtctaatttggggaaaataaagagcaacagaaaagagaacacttggtccaacacataaaaagggtgataatattttagagagtttgggtagacttgaatattatttgtttagaacctgaatctcaagtctaagtctgtaacaagatttctcttccagatgatgaggagtctgatgaggaagctgtgaagaaaaccaacaaatgtgtacta

SEQ ID NO: 13598 - DNA, 1005 bp, Homo sapiens
ggggtttcaccatgttggccaggctggtcttaaactcctgacctcgtgatctgcccactttggcctcccaaagtgctgggattacaggcatgagccaccgcacccagccaagtaatcctatattataagagtctaagggtctagaggacaaaaagtctgtaggtctttacattgtcaagaacaatgagattgtaagtatttttggatgatagtaaatacctctccctgactcttagagtaaactttggttagtaatgtaatggttaatgtaaagtgctagactttgaagaaatgtaagagtgtggaaatatttctagactcatcaactctaccttttaagcattcatctatttgtttactccagaggcctttgtttatagagaggaaaccattttggattcatctttttacttgccactccattcaggcagctgctgatgctaaaatggaagacataactaaactttcccttctccagagttcgaaatttgagcaacccagccaagaagttcaagattgaagccaatgctgggcaactgtacctgacaggggtggtggtactgcacaaggatgtcaacgtggtagtagtggaagggggtgagtctgaaaaacttgagggagactgtccccagacaaccctaggcttagagtgattagcattgtggggagaaaggagaaaaagatcgtattttagtgccatacctgatataatatgctaggtctctgcttctgtgttttttggagtagaaggccctaagatgtggttcctgagattgcttcaactaccacattaatgtctgagctcagaggttctttctaccccatcatcttccacagttctggcaaaattattcttctctgtttccaggccccaaggcccagaagaaatttaagcgtcttatgctgcatcggataaagtgggatgaacagacatctaacacaaagggagatgatgatgaggagtctgatgaggaagctgtgaagaaaaccaacaaatgtgtacta

SEQ ID NO: 13599 - DNA, 1225 bp, Homo sapiens
agaattacttgaacccaggaggcagaggctacagtgagctgagatcgtgccattgcactccaacctgggtgacagagtgagagagagaaaaaaaaaaaatatatatatatatatatgtattcttactgctttggtatactaatatctctgcctgacagttgacaatgacacaccagttactctgggagtatatcttaccaagaaggaacagaaaaaacttcggagacaaacaaggagggaagcacagaaggaactacaagaaaaagtcaggctgggcctgatgcctcctccagaacccaaaggtgcatttctcagtggcctcttctgttaaaaagagtggcaagtttatgtctttaatcctggaggaactttaacatctctgtgtttgagtgatttctgtttctaagaattattcttggggtcctttttctccaagttttctaccatcttttcatattaagataggtcaacacattcattatagaggccatttatggcttatttttaagcatactgatcatacaacactctggttttcctggaagaatacaggtcttgaaattcatggagatagtagttgcagtatttgcgtagactttttatgtacataattcttaatgttttaatttttacaatgaaagtacaggataaaaaacttgaccctgtagttacattctcgttcagcagtattttgactgagcactattatttataagctctttcactagatgctgtgatcagtgtgaaaaatatgaaaggaattaagttccacgtccttcataaattttcagataatgtaaatgcataccaatcttcaacttaattgtgtgaacttctgcaaatgctgaagtgattggatgggattttcaagataggagttattggaggaagtgagtttagagcagagatttgaaataggtaaataatatgaattggtatggaagaaataacaagttactccagctggagaagtgacttcaaagactgattgttgtcctctcttcactgcagtgagaatttctaatttgatgcgagtattaggaacagaagctgttcaagaccccacgaaggtagaagcccacgtcagagctcagatggcaaaaagacagaagtaagtgccatgggattgggtggaaacctcgggcaagtacctttcccaaactcttctggggggtccatatttggagggaggggagagttctccgttgctctctctttccctcag

SEQ ID NO: 13600 - DNA, 516 bp, Homo sapiens
agaattacttgaacccaggaggcagaggctacagtgagctgagatcgtgccattgcactccaacctgggtgacagagtgagagagagaaaaaaaaaaaatatatatatatatatatgtattcttactgctttggtatactaatatctctgcctgacagttgacaatgacacaccagttactctgggagtatatcttaccaagaaggaacagaaaaaacttcggagacaaacaaggagggaagcacagaaggaactacaagaaaaagtcaggctgggcctgatgcctcctccagaacccaaagtgagaatttctaatttgatgcgagtattaggaacagaagctgttcaagaccccacgaaggtagaagcccacgtcagagctcagatggcaaaaagacagaagtaagtgccatgggattgggtggaaacctcgggcaagtacctttcccaaactcttctggggggtccatatttggagggaggggagagttctccgttgctctctctttccctcag

SEQ ID NO: 13601 - DNA, 13552 bp, Homo sapiens
gacagcggcgtggcggcggcggtggcggtagcgacggcacgccgtagggcggtcagaaggtttccggttccggtgtaacgttcgggctccgtctcaggggctgaagtttgtgaggtgagtagtggccccgggcccacagagggtaattccagtccgcgccactgtggccggggactcagtccaaggggaggaccgaagcgggagggttcagcgggaaggagtgtgaaaggagtacctggtttggtgggagaagaggttggaatgagattgttgagaggaaaagggcgggggcgggaaggagaccgggttgggagaccagctctggggtgaggagtttaggtagaacaaggtagagtaagagactggttggagtgacggagagagtaaaaatgaagattagcgggggagtggggggctgcagagggaaactcaggttgtagcaaacaagagcacggagtaaggaattccttctgaagactggatttggattctgctgcctgctcattgagaggagagatcattgtacctcgctttccttccgcacccccactacccccgcacctcgcagttattgttgagcatttgattagtgacaaggctaattaccgtttgaaacttttttatccattggctgtttagtttgcacgtcatcttatggaggtaacagtggcacctcatttattgctttgggctttcaaattgcttatactttctagcctatcattcaattctagtggaatataagacccgttaaggtgaggactcttgttagttttgctcactgttttatgtatccaccgcacctagtacattgcttgacacttagtagttactcaataaatatttattgaatgaattaggatgtaaatatggcagtactcattttgtaagatggtaaactgtggctccaaagaattacttaacttgcccaagggcttgtaaatggtggggctcagtgtcccaactgtttctgtgtgaactcttgttttcactttctatggcatctggatatgccgcttttgtgcaatacatgtgtaatatgtagaaattggtacgctgtatgtctactcattgtggggtaatagaaccaccatagaattactcacgtaacttgtcactgaggcagaaaatctttcagtcttagtttcatcacttcaatctactagcttcctttggatataccaaaagtgagtctatttggcatcaagtcttatagactctagtatagaggctaaacttaccaagaatgtagaagttaatcagactggattttttggagaaaagatgtcttaaaacatcttgaaagatgattcccagatctttgataagtggcactgctgggaatagctgagcttggaaattgaggtcagtcaatttattgactcccatttagacaccttttttttttttccccgggacggagtcttgctctgtcgcccaggctggagtgcagtggtgcgatctcggctcactgcaacctccgccttccatgttcaagggattctcctgtctcagcctccagagtagctgggattacaggtgcaggtcaccacgcccagctaatatttgtatttttaatagggatgcggtttcaccatgttggccaggctggtctcgaactcctgacgtcagataatccacccgccttggcctcccaaagtgttgggattacaggcgtgagccaccgcacctggcttttttttttttttttttttttttggagacacagtttcactctgtcgctcaggctggagtgcacatgattttggctcaccgcaacctccgcctcctgggttcaagtgattttcctgcctctgcctcataagtagctgggattacaggtgcccaccacctcacctggctaatttttgtatttttagtagagacaggtgcagtgggtcacgcctgtaatcccagaactttcggaggtcaaggtgggcagatcacttgaggtaaggcattacctggccgatatggtgaaaccgtgtctttattaaaactacgaaattggccaggcgtggtggtgcatgcctgtagtcccagctacttgggaggctgaggcaggagaatcaagtgaacccaggagatggaggttgcagtgaaccaagattacgccactgcactccagcctgggcgacggagtgagactctgtctcaaaataaaaatgagggtattcttttctgagctgaaggatcatcaagtcagctgatggagaccctgtagattgaacatgataattacctgtatgcagaattcccactgggatgaatatgaccacagagaaatgtgacagaacattctttttttttttttttgagacggagtcttactctgttgcccaggctggagtgcagtggcgcgatcttggctcactgcaacctctgctgcctgggttcaagtgattctcttgtctcagcctcccgagtagctgggattacaggcgcctgccaccatgcccagctaaatttttttgtagtttttagtagagatggggtttcaccatcttggccaggctggtcttgaactcctgacctcgtgatccacctgcctcagcctcccaaagtgctgggattacaggcgtgagccaccgcgcccggccagaacattcttaaagatcatgagatttaatttaatatctaagatgactgacctggataaaccctcttttacttgcataccttaaaagaagggaatcctacataagtcagggttgggttagggaatgcctgcctggaagtaggaagaatggaaaagctggcctctggatgggcttttttagttctgttttagtgttactaggtttgcaagtccttgttgatatgacaggatcaagaaagaagctagaactaatttctcagacttagcttattcacagagtttgtttattccgcagatttcattgatcaacttaagagttagaattaaaaatcaaatgggatctctttctgctttgagatatggttcttggggaaaatatttgccttcaaatgagttggaaaaacttgtctagggattgagaatagggctggggaatgcattcctgatgtactaaccatttccctggatcactttagtcttttttttttttgtagagagagtcttgctttgtcgcccaggctggagtgcagtggtgcgattttgacttgttgcaagctctacctccctggttattcccctgcctcagcctcccaagtagctgggattacaggcacatgccaccacgcccagctaatttttttgtatttttagtagaggcagggtttcaccatgttggccagactggtctcgaactcttgaccccaggcagtccatccaccttggcctcccaaagtgctgggattacaggcatgagccactgcacccagcccactttagtcttttcttattctctaacttgtctcttttttttttttaggtgtagtattgagtcctgtttgagctattgttctctttttcctgaaaaatggcactgtcaaagagggagctggatgagctgaaaccatggatagagaagacagtgaagagggtcctgggtttctcagagcctacggtggtcacagcagcattgaactgtgtggggaagggcatggacaagaagaaggcagccggtatgtacctttctgcatcttttatcttaacatatagggtgaccccaaacactgctttgaacttcctcaaaattctctctgttgggaacatctaaaaaaatggcaggccatattttattttcacctgtattatagtgaaaataggctaaataataatttgctttttctcttaattgcttattttttatgttatttatgatagattttaaatcttcgtttggctaccatactgagtcacctaagttagatttacttaggaagtatgcttaagtcagataggcatattcagattcagactgaacatctcaacatacaaaaatctttatgaaatacatgaaaaagcttgaaggaggtagattttgttaatggtaggcttctacaacttgctatttgggaaaggtgagggtggttattcatctcaaacttgatgttcaaggtaaacaggttgctctaactgcaccacttcccacgccaaaaaattataactattttcacctcacagggcaaggtcatttagtgtaagagagatgggaatcctacaaaaaacttaaaatttgtttcactcctgggaataaaattccagtgttggtacctgttataggcctagtattagactgtgtactcttacctttccaaccctaccaccgcctttcttcctgtcagatcatctgaaaccttttcttgatgattctactctccgatttgtggacaaactgtttgaggctgtggaggaaggccgaagctctaggcattccaagtctagcagtgacaggagcagaaaacgagagctaaaggtaggttacaatttactgtctaatgagctcaggactgttttgaatggtaacagagttgctgagcttaccagttcacacgttgatatcctctatttagagcagcaaatgttcaagagaggtacttagacattagagtaggagagatgaattagtgtcatcaccatctgaactacctctaagttcatgggttgaaatatccaaagaaataattggcagctttgtctttttttagataacaggagttttgattctcatgtttctccatatttcctttttttccttcttactgttacttataaactgattgctctaagattttatctttgatttatttgaggcctaataagttgttttagaatgtgactccactggtacctgagctgtacacctcattgttgcctctttgtagaggtttctctgcaatgcacttgtagatagaataccaaaaaataactattatttattatattcttgagagcttaccatttgctctatggcatattgctggtcctctgctgccatgagtgaaacacttggaggagttgtcagtacccccttaactactacactttttattctgtagttgccgactgatcctggcctctttcagtattagcagtatcaagtagcctatttttctactcatttcccagtatctctctttaggagaaaaaaaaaagttctgtgactcctatcaaaccttccaaagttcttctgataccttggctatcccattacttttcctgagggaaaagagtgaataagtaatgtctgcttggtcccctggccaggctatggaactaaaaaaaaaagcagagagatttgtgccctttgtgtttggagcattgtagggtggtcagagaaggagagatagtccttgccttaaaacaatttgtaatttgtcaggcagtgtggcatgtgcctgtaatcctagctacttgggaagctgaggcaagaggatctcttgagcccaggagttacaatttagaagaggcaggggtatcacaaaatatatattcacgtattataaaatctaagtagcagtttcatgtaaattttagggttggttatagaatttcagacctatgttgaattttgttatatttaaggtggaatgattgatccacagtatacacagatctgtacagtgaagattatgtcacgatagggcatacttctttttttttttcctttttttttttctaagggtgagtctcactctgtcgcccaggctggagtacagtagcgcaatcttgactcactgcaacttccacctcccaggttcaagtgattctcctgcctcagcctcctgagtagctgggattacaggcacatgccaccatgcctggctaatttttgtatttttagtagagacggggtttcatcatgttgatcaggttggtctcgaactcctgacctcaagatctgctcgcctcggcctcccaaagtgctggaattacaggcatgagccactgcgcctggccagtagggcatacttctgtatgagtgctgagggcatgctgtgaatgaagtgactacattgggtgggattaataaaaatggcttcttgaaggaggtgtctagatagccttgggatacgggtcccatttttggtccattcaggtccccaccccacacaatatattatgggagagtcctttttcttgaactgtaggagttccaggaagcgctcgcccctggccgaggatatgtccttgcaaaacacgagccctcctagtgaagaggggatgtcacccaaagcctaccaccggtgtgtacatttgctttttcccattgtcccttccagttggccactctcggtcctgttaaattcaccttgcaaattagtcatcatatttgagtttccattgtttgatgaaaacaaagtgttaatggggattactgaagaagaaagagaaagcccctgtcctggaagagcttagacttagttgggaaaactatactaacattgaaatacttaacacttggcaaacagaatatcaacaatgtaatttaacctaatatgaaccaagctcttacacgctaagagaatgtgaaacaaaagtttaatcagagtgggataggttataatgaggaaaacttcttggaggaggtgagttttaggcaggatttggaacaggggttgtggaaaagttgagagaaatcattataaatgtgagcagtagcatttgcaaagaccttgagatgggaacatttataagaacatgggaatgaaatttgtttgactggattaggagaatgttgaagttgggtgagatggagagtctagtagaccctgcttctggcaggtggctatttgcaaggttgtgtcatattcccctgggaatagccagaaaatgctggtaggggctaggataattcttcccttctccccacggggagggatacagcttttctttcatcttgggttcccttaggaggtgtttggtgatgactctgagatctctaaagaatcatcaggagtaaagaagcgacgaataccccgttttgaggaggtggaagaagagccagaggtgatccctgggcctccatcagagagccctggcatgctgactaagctccaggttagtgattagggactggaagcaaagtggttttgtgagttgaagaagcaaaaggtgcatgggtctgtatttattgtggaattttttttttttttttttttttgaggtggagttttgctcttgtcacccaggctggaatacagtggcgcgatctcagctcactgcaacctccgcctcccgggttcaagcaaatctcctgtctcagcctactgagtagctgggattagaggcacccaccaccaagcctggctaatttttgtatttttagtagagatggggtttcaccatgttggccaggctggtcttgaactcctgatgtcaggtgatgcactcaccttggcctctcagagtgctagaattacaggagcgagccactgcgcccggctaattttttgtatttcttttagtagagacagggtttcaccatgttgggcaggctggtcttcaacttctgacctcaggtcatctgcccaccttcgcctcccagagtgctgggattataggcgtgagccagcgtgcctcgccttattgtgatcttgatttgaattagtgtttagcatttggggtaaacttttttttttgagatagagtttcactctgttgcccatgctggagtgtagtggcgtgatctcagctcacggcaacctccacctcccaggttcaagcgattctcctgcctaagcctccggagtagctgggactacatgcgaacaccactacgcctggctaatttttgtatttttagtacagatggtattttgtcatgttggccaggctgctctggaactcctggcctcaagtgatctgccacctcagccgcccaaatggctgggattacaggtgtgagccaccatgccaggccagcatttgggaaaattttatttcctgctttatgttttagcgttctttgatttgaccaggagtattctaggtaagggtattgaaattgccatttactgtggcaagcaaagtgtgttatgtacattatttgcctaattacctatgtcgttgagtcattgagaaaattaaatgaaatgatcagaactcatcttaatgacagaggagactctccaaacataatgcaaagaagatataatccactgataaataattttaagttgactttatttttttttaacaggaagtatttgtgttttttcaattggcattgttaaataataccacataagtgtttcttttaccatttaatatttgaggggggtaatagaacatatacagaaatatgggtgggtggatttgcatatatgtgatatttacagaaggaaagaaatggattttttttgtgtgtgtgtgtgagatgttctctctgtcactcaggctggagcgcagtggtgcgatctcggttcactgcagcctctgcctcccaggttcaagtgattctcctgcctcagcctcctaagtagctgggattataggcatgtgccaccacgcacggctaatttttgtatttttagtagagacagggtttcaccatgttgaccaggctggtctggaactcctgacctcaagtgatctgcctaccttggcctcccaaattgctgggattataggcgtgagccaccgtacctagcctgtttttgtttttcaggcaaggtctcacttttttgtccaggctggagttcagtggcgagatcttggcttactgcaacctctgcctcccgggcttgagtgatcctcccaccttggcttcccaagtagctgggactacaggtcaccatgcctggctgatttttgtattttttttaaagattgagttccaccatgttgcccaggctggtcttgaactcctgggctgaaatgatcctcctgcctcagcctcccaaagtgctggacttacaggcgtgagctaccacgcccagccaattattttcttttttggggggtgggggatggagtcttgctctgtcacttaggctggagtacggtggcgcgttctcggctcactgcaacctctgcctcccgggttcacgccattctcctgcctcagcctcctgagtagctgggactacaggtatgtaccaccatgcccgactaattttttgtatttttagtagagatggggtttcaccatgttagccaggatggtcttgatctcctgacctcgtgatccacccgcctcggcctcccaaagtgctgggattacaggcatgagccaccgtgccaggcccaatgatgttttttatggagaatggggatggacgtattcacaacatatccttttgttatgtttctttcttttttttttttgagacggagtctcactctgtcgcccagagtggagtgtaatggcgctatctcggctcactgcaacctccgcctcccgggttcaagctattcttctgcctcagtcccttgagtagctgggattacaggcacgcgccaccacgcctagctaatttttttgtatgtttagtagagacggggtttcaccatgttggtcaggctggtctcgaactcctgacctcgtgatccgcccggctcggcctcccaaagtgctgggattacagacgtgagctgccaggcccagcctgtaatttttcattttattttattttattttttgagacggagtctcgctcttgcactgttgcctaggctggagtgcaatgccgtgatctcagctcactgcaacgtccgcctcctgggttccagcagttctcctgcctcagcctcctgagtagctgagattacagaacgtgcatcaccatgtccagctaatttttgtatttttagtagagatggggtttcaccctgttagccaggatggtctcgatctcctgacctcgtgatccacctgcctcagcctcccaaagtattgggattacaggcgtgagccaccacgcccagccctgtaatttttaatttttttattttctttctttctttacttatttagagatggagtctccccctgttgtccaggctggagtgcagtggcatgatcttggctcactgtaacctccaccttctggattcaagcgcttctcctgcctcagcctcctgagtagctggcattacaggcgcccaccaccacacccggctaatttttgtatttttactagagacggtgtttcaccatgttagccaggctggtcttcagctcctgacctcaagtgattcgcccacctcagcctctcaaagtgctgggattacaggcgtgagccaccatgcctgacccttccgtaatttttgaattttgaatatatcacctattcaagaaaaaatgttaaagacaaatgtttaaaaatatcttgaagcagtttaagaacaggtctgttttgcaaaatgtaagaggagttgtttggccataccctcaaagcttatcattctgaacttctttaggacagaaggggtttatagagactagggagcaggtctttgcaccatcgtctcttgtttcccaaactagtagttcaagtactaatatcatgattttttaaaaaaaattaagtataggctgggtgcggtggctcacacctgtaatcccagcactttgagaggccgaggtgggcggatcacgaggtcaggagatcgagaccatcctggctaacagggtgaaaccccatctctactaaaaatacaaaaaattagccgggcgtggtggtgggcgcctatagtcccagctactcgggatgctgaggcaggagaatggcatgaacccgggaggcagagcttgcagtgagccaagatcgcaccactgcactccagcctgagtgacagagcgagactccatctcaaaaaaaaaaaagaaaattaagtataatattttgtgtaggttctgttaggtttgcatgcattatttaagtggttaacactagacctgtaaggtaggtactgttttcttcccccttctagacacttaggaggtttagagactaagttccttatccaagataacaaaggcattaagtggcagagttaagattcaaactcaggtttctctgactccagagtctcaatcatcacactatattactacctaatatgctaatcttgctttaggaacatgggttgaaaaattccagtgctcacttatcttgactaaattttttgcactgtggtgcaggcagaatgtggtatagtcattcaaaacattttaagtgtctagacctgagagccttgtgggtttaaaaacctgaatgggagaagtaagaaggagaaattaacagtttttcaatttttttcctggagagcagatcaaacagatgatggaggcagcaacacgacaaatcgaggagaggaaaaaacagctgagcttcattagcccccctacacctcaggtattgtgtctagattactctgaacagaataatctttggcacagaatttcttgccatccactcaaaatgagagactagaagaggtgactacatgtttcacttcataatcatctgctacagtctaccatgatgtgtgtgtatatctgtgtgtatgtatgtgtgtttgtctgcctgtcttaattcctctgatttctttttctctatctcacagccaaagactccttcttcctcccaaccagaacgacttcctattggcaacactattcagccctcccaggctgccactttcatgaatgatgccattgagaaggcaaggaaagcagctgaactgcaagctcgaatccaagcccagctggcactgaagccaggactcatcggcaatgccaacatggtgggcctggctaatctccatgccatgggcattgctcccccgtgagtgtctatttcatggaataccttttcatttctgaagtttgagaagcaataaatacctttgaatgttactgatctggctgggcgcagtgcctcaggcctgtaatcgtagcactttgggaggctgaggtaggtggatcacctgaggtcaggagtcaggagttcgagaccagcctggccaatatggtgaaaacccatctctactaaaaatacaaaaattagccaggcgtggtggtgcatgcctgtaatcccagctactcgggaggctgaggcaggagaatcgcttgaacacaggaggcagaggttgcagtgagctgagatcgtgccactgcgtgggtgacagagggagactccggctcaaagaaaacaacaaacaaaatattactgatcctctttttccacagaacctagatcatttctcacagtttcatatttcttaggtgtgattgattaaccagttgaattttttctcgtcttccctgttggagggtttattatcttcttatgatttatataactgagattaaggttattcatctaatgttggagctaggagtatagccaggtttccttcctggtttcaaactcagatttatccattaaaccacattgtgtgagactagatctgaggttcctctgcaactggtcaaagatgttacattttttttagcatctacagttggtctggcatcccatgagtgacataagaattcagggataaggaaagataggattataaattcatataatttataaactcatttcatttggttgtcctgtatactgaaatatccactttgatatttttaatcaagatactattggcagggcgcggtggctcacacctgtaatcccagcactttgggaggccgagactggcagattgcttgagctcaggagttcaagaccagcctaggcaacatggcaaaaccccatctctctaaaatatacaaaaattagccaggcatggtagagcatgcgtgtagttccagctacttaggaggctgaggtgggagaatttctttgggcctgggaggttgaggttgcaatgagctgtgattgtgccactgtactttagcctgggcagcagagtgagaccatgtctcaaaaaaaaagatggtattgctcactgatgagattgttccctagaattattttattgtcctttttgttgttgttgttgttgagagggagtctcactctgtcacccaggctggagtgcagtgatctcggctccctgcaacctctgcctcccaggttcagtagctgggactacaagtgcccgtctaaattttgtattttttgtagagatggggtttcactgtgttgccaaggctggtcttgaactcctgggctcaagccatccacccgcctcagcctcccaaagtgctgggattacagtgtgagccaccacacccgtccatccaaataactcttatagagaaggcactgcagcctcaacttcctgggctcaagtgatcctcctcaacctcctgagtaggtgggaccacaggtatatgccaccgcacccagctaattttaaattttttgttgagatgcagtctccttgtgttggccagactggtctttaactcctgggctcaagtgatccctctgccttggcctcccaaaatgctgtggttccaggcttgagccaccacgcctggctttattttgttttttgcttgccttaatgttccatacaggatttatttctttgcgggctatttttcaggaaggtggagttaaaagaccaaacgaaacctacaccactgatcctggatgagcaagggcgcactgtagatgcaacaggcaaggagattgagctgac

SEQ ID NO: 13602 - DNA, 1082 bp, Homo sapiens
gacagcggcgtggcggcggcggtggcggtagcgacggcacgccgtagggcggtcagaaggtttccggttccggtgtaacgttcgggctccgtctcaggggctgaagtttgtgaggtgtagtattgagtcctgtttgagctattgttctctttttcctgaaaaatggcactgtcaaagagggagctggatgagctgaaaccatggatagagaagacagtgaagagggtcctgggtttctcagagcctacggtggtcacagcagcattgaactgtgtggggaagggcatggacaagaagaaggcagccgatcatctgaaaccttttcttgatgattctactctccgatttgtggacaaactgtttgaggctgtggaggaaggccgaagctctaggcattccaagtctagcagtgacaggagcagaaaacgagagctaaaggagttccaggaagcgctcgcccctggccgaggatatgtccttgcaaaacacgagccctcctagtgaagaggggatgtcacccaaagcctaccaccggaggtgtttggtgatgactctgagatctctaaagaatcatcaggagtaaagaagcgacgaataccccgttttgaggaggtggaagaagagccagaggtgatccctgggcctccatcagagagccctggcatgctgactaagctccagatcaaacagatgatggaggcagcaacacgacaaatcgaggagaggaaaaaacagctgagcttcattagcccccctacacctcagccaaagactccttcttcctcccaaccagaacgacttcctattggcaacactattcagccctcccaggctgccactttcatgaatgatgccattgagaaggcaaggaaagcagctgaactgcaagctcgaatccaagcccagctggcactgaagccaggactcatcggcaatgccaacatggtgggcctggctaatctccatgccatgggcattgctcccccgaaggtggagttaaaagaccaaacgaaacctacaccactgatcctggatgagcaagggcgcactgtagatgcaacaggcaaggagattgagctgac

SEQ ID NO: 13603 - DNA, 17135 bp, Homo sapiens
acttcctgtcagtgacgcacttcccctctgctgggcgcgcggtggacggtctgaaagggagtgttcgggtttcgctggggcctcgcggctccagagcccagcatggcttcctcgcgagcctcttccacggtacagagcccgggatcccagctcactctggcagggagcgctaagggggaaggggatctctgcgggaaggggccgttaaggagcgggagaaggcggtggagggctgaggaggaaggctgcgggactcagcggtgtcctacacagcggaccaccgttttcctgatccctaagcgctttcgtggactgtagcttatttgcacctctcccactacagccccaaagggcaagcatctcttccgactcatccagtaacggtgctctgaaatagggaagtgtcttggccaaggtttatgcctttggcagatctcagaattttaatgagacctactaactcctactacctcacgtctaggaacgtttgaaatgtatacacttgtaatgttgtaacttgttatcctttagcaccgcgttggttatttcatctatccttagtatttccccagtgataagcagtaatccgggaagcataaaacacgagattgaacacttccaacggaatgaagtaaacagatttcagagcaaacctttcataggaaaatacccgagagaacctcactagttttattaatcccatcaaccaaagtgagggactgaaacaccctcaccctaccttcacctcctcaaatcaatgaagagcgtcttaagtagtgtccaatttgtcctttcaattacagaggaaacaggactgtgaaactcagggtgagcttcatcctctggtgaagtccggtaaattgccaagattaaaccttagtttaatgcagatctttgatttagcaggcaaccaaaactaaagcacccgacgacttagttgctccggtcgtgaagaaaccacacatctattatggaagtttggaagagaaggagagggagcgtctggccaaaggagagtctgggattttggggaaagacggacttaaagcagggatcgaagctggaaatattaatataacctctggtaagatgcaaattgtgagcccatctttacctctttgtgtaatgaatacctttctaaacttaaataccacagttttataatgtcaaaaaattacaatttttttttttttaaacagagtctcgctctgtcgccaggctggagtgcagtggtgcgatcttggctcactgcaacctccgcctcccgggttcaagcagttctcctgcttcagcctcccgagtagctgggattacaggcgcacaccaccacgcccggctaatttttgtatatttagtagatatggggtttcaccatgttggtctggctggtctcaaactcctgaccttgtgatccgcccgcctcgtcctcctaaagtgctgggattacaggtgtgagccactgtgcccggcagaatttcaattcttaaacttgcagctataaggctgtattttgcctacccccttattatcatgcagagagcctttttcttacaatctgttatatagtttttcttctatgagtgagcagtcttatcaaaaattcagtgtacatttggattcagattgattccatttgtcttctggagatctaacatagttctggcattggtttgcagctagagtggttcatgatattctcccttttgaagttttgtaattattttttacccaaagtgaaatctttttgtgtgtgtgtgtgtgtgtgacagggtctcactctcttgcccaggctggaatgcagtggcgtaaccttggctcactgcaacctctgccttttgtgttcaagggattctcctgcctcagcctcccgattagctgagattacaggtgcccgccaccacacccagctaatttttgtatttttagtagagactgggtttcaccatgttgcccaggctggtctccaactcctgacctcaaatgatccgcccacctcggcctcccaaagtgctgggattacaggcgtgagccactgcacctgactgagctatctttttttattataaaagtaatagtggccaagcctggtggctcacacctgtaatcccagcactttgggaggctgagaagcgggagtctggcttgagcccaggaatccaagaccagcctgggcaaatagtgataccccatctctacaaaaagtagaaaattagctgggcatggtgacacgtgcctgtattcccagctaattggggttctgaggtgggggttcaaggctgcagtgagtcatgactgtgccactgcactccagcctgaacaacagagcgagaccctgtctcaaaaaaaaaagttattttcttttaaaagatcaatgtataaatgtgtgaagtagaaaatcctgtatttttaaaattaattgattgtatatctttctgagaattttaatacagctaaaaagtatgtaattttttccataaatgaaaacacaatacgtaaattgttgtataacccccatttttcatttatataccattgaggatatctttccatgtcagtaatgagaggtctactatattttaaaaataaaattatgcatatttgtcctaagaaattcagacaatgccaaagggcataaaatgaagactcctctgcagtagggacatctgtcaggtttcttattgatcctcccacacattttctaaacacatgcactgtagcctagtgactttttaaacttttaatactgtttttaaacataacgtcaccactgtacctctcattttttatcacacttgtattttggtgtgggtttcaaaactattgctagattatccagaaatccttatagttgtggaactctcattttcctggtaattatttgcagtttagtagttaatgatttgttaagtatccctatactgggtctcctttcgagaataaatagctttggctgttgttacaataatgtttctgttacatcttctggatagacagcctagttaactcatttgcaaaagatgttctgtactcttacttgctggtctcagccaaagtgtgtgtttatataggcacaaagttaataaatgaaacaagaggtggcttgaaccattttcttgccttttgaagctgtgtcatttaggtttatgtgtttggcataatttaataaactgaaaaacagtaaactataaaatgtgtaatagacagttacttttccctcagggcatacacagactgcaattactagaaattatttctctctatttgaagaagatctgctgatgttgcctgttttctttttaataggagaagtgtttgaaattgaagagcatatcagcgagcgacaggcagaagtattggctgagtttgagagaaggaagcgagcccggcagatcaatgtttccacagatgactcagaggtcaaagcttgccttagagccttgggggaacccatcacactttttggagagggtcctgctgaaagaagagaaaggttgcctttctaaatatttactttttttctttattataatcacagggttctactccaaattttggttgatcatttagttgaactttaatagaatgtctcaaatcatgttaacaatatcttactgtgtttatatgagttagcccataatctgtcttaggccaatttttaccgcactattaatgtttcttttttgtgtttgttcgtttttgttttgttttgttttgttttgttttgttttgttttgtgttttgagacagagtcttgctctgtcacccaggcttgagtgcagcgtcgtgatctcggctcactgcagcctccgcctcccgggttcaagcgattttcctgcctcagcctcccaagtggctgggattacaggcacctgccaccacatttttcttttttgtatttttagttattttttatatttttgtatttttagtagagacagggtttcaccatgttggccaggctggtcttgaactcctaacctcaaatgatttacccaccttggcctcccaaagtgctgggattacaagcgtgagccttcgtgcctggcccgtttttctttatagacttggaagagggtgctaacatgctcccttgcctcccctccccagtgcgagttttgaattggataaacatttgttgttgggctttgaaaattgagacatcaaatgcattccatatcaatgacatagaacaatgataaatgtttcttggattttattgaagaggggtaccatcctcagataatgccctcttgttatttgcaggttgcgaagtcttagttgtggtctagtcacacacaattatgaggagcccctctggtctctctgtccactgtctcatctacccttcatcatccagcttgttggaagggttttttctattactcccttgaggtccttacccttatttactcttcaacctgctgcaaactgaccaacccctaccacattaaaattgctctttgttaagatcaccaatccacctttactaagaatagccctagtatactgccagccactcctccttgaaatactccctccttgaactactccctttccttcactctcctaataacaaatcctcttgattttcctcttctctcactagctaattcttctcacttaccttctaaacctctttttctctgcctgccctttacaggctgcctttttctctacttgcccttggtgatcagctctactcccatggcatcattcactgtgtgttctgatgattcccaaatctctcactgcagcttaggtatcccacaggtacttcaaacttgagacatctgaattgaaatatttccccacctctctcctatactcatacaattcttagttgaaaatctgcctagcctcctttataatccattagcaaaatctggtctgttctacttgcgagatacaactccagctatcttctttgctctatctttactgctttcaaatctgcactgttgtgatagccccaaacatgttgtgttaattgcttgcttaaaatcctagattgtcttctcatacttggagtaaaaaactcttaccatggtctgtaaggtcttcagccttactcatgtctcccttccccaatttactagaatagccacattggtccttatggaatatgctagttctttttatgtctttccacataattggtctacttttattcttctgtcttgtcttttagaggctttttttcttcctttttttttctttgaaacggagtctcgctctgtcacccagggtggagtgcggtggtgcaatctcagctcactgcaacctccacctcccaggtacaagccattctcctgcctcagcctcccaagtagctgggactacaggcatgtgccaccatgcctggctaatttctgtatttttagtagagacggggtttcaacacgttggccaggtgttgaacacctcctcaagtgatcctctcaacacctcctcaagtgatccgcctgcctgggcctcccaaagtgctgggattacagatgtgagctaccgcgcccggcctttcttcttcattttttattaacctggatccctgtcaaacttcttattctttcgtttcagcatagatgccacctattcaaagaagcctttcgtcacacctaacccctctgttctctgtcatagtatgttattttattagccttttcaaagggtatacttttttattattgtttagtttgttttttccaccagcaaagtctatcttattcattattatgttccttaaatgaatcctttgagtcactactgctactatctgaatttcagtccacggttgtgactcagagcgtcactacaacagtactgtctgatttccctgccattattcttcccttttaatccattctttgtactgtttcagggatctttctcatctgtaaatcctcctgagcgtggcattagcaattctttgtgacctggctcctccttgcatttgcagccctattcttcaccagtcctcttctatgttctacgctccagccatattgaattatttgtgactgcaagctcaacatgtttttcttacctccaggccttatttgtttaaccctctgcctgacattttctcattcttgacccccttgacctgattaactgaggactcaatttacatattacctttttttaatgaagccttccctgatcctctaagcttagttagatgcccgttacaaagtcccctctagccctctgtgcttactgctatagtgataggtaatataatggattatagtttgccagtactctctgttgtttccccaggactaagctacttgaaatcaagaactgattcctagtcatcactgtatagttagcacctgagtcagtatccagtacattgtggcactgagtgaaagttggcagtcttcacagaccaagtggtagcagtgtaggggctcattgactctaaactgtatagagtaattgcttatagttgaattttggaaatttccaaatagagaagactgagtgggagaaaccacactgggagtttagccatccccacttgactcttaaagaaggttcctggagggccgggtatagtggctcatgcccgtaatcccagcactttgggaggctgaggcaggaggatcacttgagcccagaagttcaagacttgcctgggcaacatagcaagcccttctctctacagaaaaatttaaaaattagccagttgtagcagtgtacatgtagtcccagccactcgggaggctggagtgggaggatcgcttgagctcaggaggttgaggctgcagtgacccatgatcatgccactgcactccaccctgggcaacaacaagacctcatctcttaaaaagaaaaaaaaaaggttgctaggtggtttgaacagtgagagaatagtaaaggcttgctcccatcttaggggaactttaataacagtgtttaaaactgtgttaaagtgtactttaaaaacagtattatctcaaccatgtttaaattctgatctttttttttttttttaacaggttaagaaatatcctctcagttgtcggtactgatgccttgaaaaagaccaaaaaggatgatgagaagtctaaaaagtccaaagaagaggtagaacatgtctttaacttcacagtataaacatgaaggaaatgaggggataggtctctcgttttctgctttcaatggtttgttttgctgagatgttgggggaaatgtttttgaaggctctaccattcaagaagagttgctggcagtagttttggttcctttgtaagtatgaatggagctaagtgagttttccagtcaggaaagaatcatggcattcctggtataaccatgtagttacatatcatagaaaaaaattcagtagaaagtcctctgcctgatttcatcctattaccgaatgaattcaccttccttctgggcagttaaaatggagaaatgacagttataagaggagtagaatgcttcagatttgacctttctgctcttaatttgcctttcagtatcagcaaacctggtatcatgaaggaccaaatagcttgaaggtggcaagactatggattgctaattattcgttgcccaggtaaagagagcctccagtagaagaaagaagcatattttttgtgtgtgtttcctctcaggaactgagtgctggataatgactatggttgttaaatgaaattgaggggtagagtagggatacatgtgggtccttgtttacaaccctgttgctcctggtgatggtgtttctgtgtcgcagggcaatgaaacgcttggaagaggcccgactccataaggagattcctgagacaacaaggacctcccagatgcaagagctgcacaagtctctccgggtaagatgctcccagcaattgtcccacatcttaaaggttcttcatgtttatttgatttttctactttggctcacctctgggaaggtagaggcaactagagtgattcctccctgcttaagttgagctgctgtgacatggaaggagccatcagttaatgtggcaggagcttactgtgctttgtattcagcagaggcctatggttctattctttatttctccccgttaatatgtcagagtttctctggggttttctgtttatatttagctgactcagaagttgtgatcctaagactgtagaaaacatctgggcacagtggctcagtcctgtaatcccagcattttgggaggcagaggcaggcggatgacttgagcctcaggagtttgagaccagcctggtcaacatggtgaaaccctgtctctactaaaaatacaaaaatttgccaggtgtgatagcatgtgcctataatcccaggtacttgggaggctgagacgggaggattgcttgaacccgggaggcggaggttgcagtgagccaagatcacgccactacactccaccctgggcaacacagcaagactctgtctcaaaaaaaaaaaaaaaaaaagactatagaaaacagcatgctggagtttcatataacttcatttatcaatgtatgtgtcttctaacagcagcaacaaaaccatagaagaatcttgggatgggttaaaactgaaaagctgctttgttgttctttttatggtggaaaagcaaaggagctcttagattaacctattaatgatcaccgtgtgtgtattttttttctttttaagtctttgaataatttttgcagtcagattggggatgatcggcctatctcctactgtcactttagtcccaattccaagatgctggccacagcttgttggtaagttccattttacaatgacattttttcctaaatggggaacaggctcaggaagaaaattagcatttgcgttagacgtctatttctacgtcctctttctctgcttctcatgatcacaccaaactacagatgtcagtcagtgctctacctgttgtataatacaatgtagccttggtttagccgttctcgctcttcaccagtgaccccagagatccattacacaaagcactctgtcacattcttgacactagtattttggaacaggtcctgtagtgagtttatagaccaactagtatccataactcagtctggcttttctttttcagttatgtgacctcgctaagatacttaatttctgtaagcttcagtgttcttacctgtaaagtgggatgaggtagtgtttgcaaggcattttgccttgacagtgcctggtatgtagtaaggactcgttaaacgttaattattggtttatctttgttttattttcttatcaccacatatgcagaaaactcaggatgtggtaactttgttgttttgtttgagtttggttgtgtttttctgtgggacatggctatctaatgagaaaggaaacttagattgaatacacaggagctacttgactaggctgacctttagatgggttcaggagaaagccaaggttctgcacaaatgagtccacctctccaagcctcattaccttcactataaagtttgatcgttcctgccgtacctgcttcacaggtctgttagaaagatcatccgagataatagatataaaagtaatttgttgaaaaatttccaaaataagaagtctctaaaaagtttaaggccagccagccatggtggctcacacttgtaatcccagcactttggaaggccacggcaggaggatcacttgagcccaggagtttgagaccaggctgggcaacaatagtgagaccctgtctctacaaatttttttttttttttttttttttttttttttttttttttttttttttttttttgagacggagtgtcacactttcggccaggctggagtgcagtggcgcgatctcggctcactgcaagctccacctcctgggttcacgccattctcctacctcagcctcccaagtagctgggactacaggcacccgccaccgcacccagctaattttttgtatttttagtagagacagggtttcaccgtgttagccaggatgggctcgatctcctgaccttgtgatctgcccgccttggcctcccaaagtgctgggattacaggtgtgagccacagcgcctggcccaaaaaatttttaaaaatttatttaattttttaaaacgttagccaggtgtggtggcatgcgcctgttagtcccagctactcaggaggctgggtgatagaattgcttgagcctgggaggttgaggctgcagtgaactgtgatcacactactgcactccagcctaggtgacagagtgacactgtttctcaaaaaaaaaatttaaatactttgtaatcagcaaaatactattcatatttaaggacagtatcactattaatattcgtattattggatagtttaatttgccccaccttccctcacaagtggatccaaaagttaaggagaatggctactggtgtagtgttaattatagtccagtaaaagcctctggttgcgtgtgggctggaggtagctttttcttctataacccttctaactataaggcttttatttttctgtcagccattgtaaagtttattgggggtgagaagagattgtcctttagtaatattaccaaggtaccttttccttcccagaccaaccctggctgagatgctttcctttgtatttgataggagtgggctttgcaagctctggtctgttcctgattgcaacctccttcacactcttcgaggtaagttagagtcttatccaaatctcggtctttttcccagtgtgaactcagttaagccttaaactctgcttgacactcagaccccatacacacagcattaatccttgatttgatttgacttggttttctctggctgcaagactggactatcacaacttcctacacatccacttttctctcatgtgcagtcacactctggcattttataatctctaaaccaaaaaccaaaatgggtttttttgtgttttgcttttttaaaaatgtaatttaaatattagcttaaattaaaatagttcatgttttaatagttgaatagtcacttgaatactctgtatgtccacatgttccctagtatataacatgggttataaagaggcaggaaccttttaacttgcatctcttacactcctttagggcataacacaaatgtaggagcaattgtattccatcccaaatccactgtctccttggacccaaaagatgtcaacctggcctcttgtgcggctgatggctctgtgaagctttggagtctcgacaggtgaatatcactgttctgtggcccatactgccatcactaaagtagatgtttgattggttggtccccaggacctcagtaaaaatctggcatttaggccatgcgcagtggctcacaccttaaggctgaggcaggagaattgcttaaacccgggaaatggaggttgtggtgagccgagattgcacactgcactccagcttgggtgacagagcaagactccgtcttgaaagaacaaaaaaaaaaatctggcatttaacccccaagatggtttaagagtcaaggtaacctagtgtgaaaatgaagtaagtggaagatttcattcttaggccttttcttactaaaggagttatgtccgttttttcttacctgttaactttggatcttgatttttgtctatagcctagtgaccactatttcctagctccatttattccagaaagatccagcctacctcctacatgataaattaacaatgaactaaatataatattcttggcagttcgttggttcttagcaaacagccacaggggagaggaaagtgaggttctgtctagcagtattaccacggagatgtctcctcgcaatagcatcatcctttacctagaatgtattttccaactacaacagtttttaaaaatgtgtttatgtgattgttttccaaaaaaaaaaaaacttcggaagcaccctgttggccaaaaggcatctgaatttaattgtttagttttctttctttgggaaaacacatgaaggtttttacttgagaatttttatgagagctaattaatgtcttcactcctcaccagacagggtctcacttaggagcgcagtgagttttaattggctttggtaatacttagcaatgtttattccccttgggctttggcttgttctgtgtatgcacattgacaaagttccctttttaattgcgttccttagagttcatgtttatttccttttgctgatgttcagatcttttggtggttgctgggtagcagaatttaatggccaccaaaaggagactaagcctcatctctatttaggagttcctttttcatttggatcttggaacaggcctaaatttgaaaaaggtttatctgtaatccacttgtaccaaaactatgtgatttctgtgtccttatatctcttccaaagcatgttttctttctagaatccaggtactcctttggtgcagaatgactattttgcttattgggccaaagtagtttacaagtgtagttacaatttagcctctcgtgttgtacagaatgggtatgtctgcacagaaggtaagcagttttgtgactatttatatgtctataaaattgtttatatgtttggttcctttccagtgatgaaccagtggcagatattgaaggccatacagtgcgtgtggcgcgggtaatgtggcatccttcaggacgtttcctgggcaccacctggtgagccatcctgttattgttttatccatataggcctgtagcatcttcttaaccctttatggctatctgccaggtaaatttttagagcagagatcttcaggtaggattttcttgggctgcagggaattggaatcagaggagaatgtttaatatagtgagagctaagtatatttgccttttttttttttttgaggtggagtctcactctgtcacccaggctggagtgcagtggcgcgatctcggctcactgcaaccgccgtctcccgggttcaagcaattctcctgcctcgacctcccgagtagctgggactacaggcgcgtgccaccatgcccagctaatttttttatttttagtagagacagggtttcaccatgttggccaggctggtcttaaactcctgacctcaggtgatcttcccgcctcagcctcccaaagtgctgggattatagataacaggtaacgcgcccagccatatttgcctttaaattacaattaatctgaaatttcagagttacaaattaccagaaaacaaggattttcactcttgtccaatgctacaggtatataagtctcccttcctggttctgtaagttcagggaggctagaatctgttagagaacttttccattaagttataatttacatacaatggaatggatttattttaagtgtacaatgctgtcagtctttacaaacgcgtaccattcctgtgatcgacacctctgtcaatatagagaatagtccatcaccccagaaaggtccctcatgcccttttccagccaactcccccttctaaagcaactgctgatctgacttctatcaccacaaattaattatgtctattcatactgtgaattcatttgtggcaggcttctttcagcataacattgttaagagtcattcatgttgttgcatgtatcagtaattcctttttattgctgggggttattcatttttatgactgtgccatagtttatccattctcctgttgatggacacttgggctgtttccaggtctgggccagtcagaatgaagctgctataaatattcttgtaccaggctttttgtggacatgagtacaattgctgggtcatagggtagaggtatgagatgtatatttaactttttctaaactccccaccagttttccaaagcggttacaccattttacattcccggagttctggttacttcacatccctgttaacatttggtgttgtcagtcttaccattttgcccaatctagcaggtgtgtagtgatctcccgtgattttcattcttattaccctgatcattattgctcttgagtgctctgtcatatgctttgcctggttttttaaattgtgtttgtctcttttgtctttatttccatgtgcatagtcagttataccaccttgtattgaagagactttcctttctctgttggaattgtttcagtacccttgttgaaaatcatctgaccatatatgtgtggttatttctgtacttcctattctcttccattgatctatttgtgtatgagtgatttttgtatccccaacatccaatttagggcctagtaaatgtataaatgcttgatgaatgaaagaatataacagtggaggaagaaagaaggtaacagagtctttgctgggccattcttggggaatcctgttattacaatagccactaggttgggcatggtggctcacacctataatcccagcactttggaagaccacggtgggtggatcacctgagctcaggagttcgagaccagcctggccaacatagtgaagccccatctctatgaaaaatacaaaaattagctgggcatggtggcgcacacctgtagtcccagctactcagaaggctgaggcaggagaatggcttgaacccgggaggtggaggttgcagtgagccaagattgcgccactgtgctccaggctgggcaacagagtgagactctgtctcaaaagaagaaaaaaaaaaaagccctagaggtttacagcgattccatggttttcagctagcacctaaggcagataagcttagttgttgagtcattgtttatgtcagaaaggagcttcctgttaatatggttatatgaatagtttcagaagcattaataacttaagctataatggcttagaatactttatgtgttgtagaaactgaataaatatcagctggttgattgttagtgtgatttggttttagctatgaccgttcatggcgcttatgggatttggaggctcaagaggagatcctgcatcaggaaggccatagcatgggtgtgtatgacattgccttccatcaagatggctctttggctggcactgggtaaggcttctcccatgtagtcaggggcagttcagtactctcacctcttacctatacctgcttccacagagaactggattcaaagtgttcatttctaaattattttctcaggggactggatgcatttggtcgagtttgggacctacgcacaggacgttgtatcatgttcttagaaggccacctgaaagaaatctatggaataaatttctcccccaatgggtaaaataaacacactgaatgaggggcgaaaaagggttctgggtcagtaagtactctatttctaacttcaatactgcatccaatccacagctatcacattgcaaccggcagtggtgacaacacctgcaaagtgtgggacctccgacagcggcgttgcgtctacaccatccctgctcatcagaacttagtgactggtgtcaagtttgagcgtaagctttcctcctattttacgtctaaatgacacagacaaacagtattgtgttcccgtggaatgcaggccaggctttagcttaactgagcagtaaaacaggagagaaattgacctactggtaaaggagcaaattataatttccttccctctgccatacccttagatctgtgggaaagcacgcttctcgttgcaggaagtaaagcagactttcatgagtgctttgcttcattctttcctccatggatgctctgagcactgagtccttaatattattctgaatagattctcggtcagggaatgagccaaaagaccttactgttatttgttcccttaagtctgtagaaacaagtttttttaaaaatagtatgtttttgcagacttttgtgcttttgtcttctcttttgaatacttgaattcctcaagcaattccccttctcttctcctgtagctatccatgggaacttcttgcttactggtgcctatgataacacagccaagatctggacgcacccaggctggtccccgctgaagactctggctggccacgaaggcaaagtgatgggcctagatatttcttccgatgggcagctcatagccacttgctcatatgacaggaccttcaagctgtggatggctgaatagatgacaatgggaaaaggacttgaacctcaagctctctctaaggagctgttttcctcaaacgagaagaattgaagtgtttagttctatcatgttttctgccaattaccatgcatagaccctcagtagaattggatttccatgtcagcccccactccaggaaggcagcccaatccctaggtgatggggaacccctctcacggttgaaaatttattacctttttacgccctgccacgaactgtgtagacattgtttttattaatcttttgtttggccgggcgtggtggctcacgcctgtaatcctagcactttgggaggccgaggtgggtagatcgcttgagctcaggagttcaagacgagcctgggcaacatggcaaatgccgtctctgcaaaaaaatactaaaattagctggtcgcggtggcttctgcctgtgattccggctacttgggaggctgaggtgggagggattgcttaagcctgggaggcagaggttgcagtgagccgagattgcgccattgcactctagcctgtgtgacagagcaagaccctgtctcaaaaaaaaaaaaaatttgttcgaatgccttatagccttcctcacagcacccaggattgtgactgactctgcatttttaattcttgaaacttggctttccataacatggtacatgcttcaggactacatatgacccagagagcaaggtggctgaactatagtctggaagccctcaggtaaagaggcacatctcaccactcattggttaaacaatgcatcatagcgagcacttttcctttccctggagaatgggatgtgaagcagtagaccgcagccacgccgatggttatacagtgaagaagacttcacctcttcctattgagtttgcttggaatgctgacagcatcaggcaactctgaactgaacatttgctttgtcagaaaatatctttttttttactttgaagtttggcaaccttcatgttaccccaaagcaaaaccattgtgtcaggagtcaaacaaatgtttagaaagcaaacatgacgtctctattgtacaacctcctttctcttggctgtttaaaggatgtacttcgtgtattaaagggtactttatgttgaagtaa

SEQ ID NO: 13604 - DNA, 2787 bp, Homo sapiens
acttcctgtcagtgacgcacttcccctctgctgggcgcgcggtggacggtctgaaagggagtgttcgggtttcgctggggcctcgcggctccagagcccagcatggcttcctcgcgagcctcttccacgcaggcaaccaaaactaaagcacccgacgacttagttgctccggtcgtgaagaaaccacacatctattatggaagtttggaagagaaggagagggagcgtctggccaaaggagagtctgggattttggggaaagacggacttaaagcagggatcgaagctggaaatattaatataacctctggagaagtgtttgaaattgaagagcatatcagcgagcgacaggcagaagtattggctgagtttgagagaaggaagcgagcccggcagatcaatgtttccacagatgactcagaggtcaaagcttgccttagagccttgggggaacccatcacactttttggagagggtcctgctgaaagaagagaaaggttaagaaatatcctctcagttgtcggtactgatgccttgaaaaagaccaaaaaggatgatgagaagtctaaaaagtccaaagaagagtatcagcaaacctggtatcatgaaggaccaaatagcttgaaggtggcaagactatggattgctaattattcgttgcccagggcaatgaaacgcttggaagaggcccgactccataaggagattcctgagacaacaaggacctcccagatgcaagagctgcacaagtctctccggtctttgaataatttttgcagtcagattggggatgatcggcctatctcctactgtcactttagtcccaattccaagatgctggccacagcttgttggagtgggctttgcaagctctggtctgttcctgattgcaacctccttcacactcttcgagggcataacacaaatgtaggagcaattgtattccatcccaaatccactgtctccttggacccaaaagatgtcaacctggcctcttgtgcggctgatggctctgtgaagctttggagtctcgacagtgatgaaccagtggcagatattgaaggccatacagtgcgtgtggcgcgggtaatgtggcatccttcaggacgtttcctgggcaccacctgctatgaccgttcatggcgcttatgggatttggaggctcaagaggagatcctgcatcaggaaggccatagcatgggtgtgtatgacattgccttccatcaagatggctctttggctggcactgggggactggatgcatttggtcgagtttgggacctacgcacaggacgttgtatcatgttcttagaaggccacctgaaagaaatctatggaataaatttctcccccaatggctatcacattgcaaccggcagtggtgacaacacctgcaaagtgtgggacctccgacagcggcgttgcgtctacaccatccctgctcatcagaacttagtgactggtgtcaagtttgagcctatccatgggaacttcttgcttactggtgcctatgataacacagccaagatctggacgcacccaggctggtccccgctgaagactctggctggccacgaaggcaaagtgatgggcctagatatttcttccgatgggcagctcatagccacttgctcatatgacaggaccttcaagctgtggatggctgaatagatgacaatgggaaaaggacttgaacctcaagctctctctaaggagctgttttcctcaaacgagaagaattgaagtgtttagttctatcatgttttctgccaattaccatgcatagaccctcagtagaattggatttccatgtcagcccccactccaggaaggcagcccaatccctaggtgatggggaacccctctcacggttgaaaatttattacctttttacgccctgccacgaactgtgtagacattgtttttattaatcttttgtttggccgggcgtggtggctcacgcctgtaatcctagcactttgggaggccgaggtgggtagatcgcttgagctcaggagttcaagacgagcctgggcaacatggcaaatgccgtctctgcaaaaaaatactaaaattagctggtcgcggtggcttctgcctgtgattccggctacttgggaggctgaggtgggagggattgcttaagcctgggaggcagaggttgcagtgagccgagattgcgccattgcactctagcctgtgtgacagagcaagaccctgtctcaaaaaaaaaaaaaatttgttcgaatgccttatagccttcctcacagcacccaggattgtgactgactctgcatttttaattcttgaaacttggctttccataacatggtacatgcttcaggactacatatgacccagagagcaaggtggctgaactatagtctggaagccctcaggtaaagaggcacatctcaccactcattggttaaacaatgcatcatagcgagcacttttcctttccctggagaatgggatgtgaagcagtagaccgcagccacgccgatggttatacagtgaagaagacttcacctcttcctattgagtttgcttggaatgctgacagcatcaggcaactctgaactgaacatttgctttgtcagaaaatatctttttttttactttgaagtttggcaaccttcatgttaccccaaagcaaaaccattgtgtcaggagtcaaacaaatgtttagaaagcaaacatgacgtctctattgtacaacctcctttctcttggctgtttaaaggatgtacttcgtgtattaaagggtactttatgttgaagtaa

SEQ ID NO: 13605 - DNA, 17563 bp, Homo sapiens; identical to SEQ ID NO: 1242

SEQ ID NO: 13606 - DNA, 3212 bp, Homo sapiens
cagagttcagccccgagccgcgcgagtcgactcacctacctcttttcaagccggcctagccccttcccggaacctcggctcccccccaacgaaactactgctaagccaactggactacacttcccagactgcttggagcctctctctccgcagaacctcgtcttccgcgagcttttcctggaggttctaggagggatgcccctcaatgccacgacgccatttcctactacgacttccatcatgctccgcgccgctccgggggcggtgacccctcttggcccacgtcttgtcagtgacgcacttcctgtcagtgacgcacttcccctctgctgggcgcgcggtggacggtctgaaagggagtgttcgggtttcgctggggcctcgcggctccagagcccagcatggcttcctcgcgagcctcttccacggcaaccaaaactaaagcacccgacgacttagttgctccggtcgtgaagaaaccacacatctattatggaagtttggaagagaaggagagggagcgtctggccaaaggagagtctgggattttggggaaagacggacttaaagcagggatcgaagctggaaatattaatataacctctggagaagtgtttgaaattgaagagcatatcagcgagcgacaggcagaagtattggctgagtttgagagaaggaagcgagcccggcagatcaatgtttccacagatgactcagaggtcaaagcttgccttagagccttgggggaacccatcacactttttggagagggtcctgctgaaagaagagaaaggttaagaaatatcctctcagttgtcggtactgatgccttgaaaaagaccaaaaaggatgatgagaagtctaaaaagtccaaagaagagtatcagcaaacctggtatcatgaaggaccaaatagcttgaaggtggcaagactatggattgctaattattcgttgcccagggcaatgaaacgcttggaagaggcccgactccataaggagattcctgagacaacaaggacctcccagatgcaagagctgcacaagtctctccggtctttgaataatttttgcagtcagattggggatgatcggcctatctcctactgtcactttagtcccaattccaagatgctggccacagcttgttggagtgggctttgcaagctctggtctgttcctgattgcaacctccttcacactcttcgagggcataacacaaatgtaggagcaattgtattccatcccaaatccactgtctccttggacccaaaagatgtcaacctggcctcttgtgcggctgatggctctgtgaagctttggagtctcgacagtgatgaaccagtggcagatattgaaggccatacagtgcgtgtggcgcgggtaatgtggcatccttcaggacgtttcctgggcaccacctgctatgaccgttcatggcgcttatgggatttggaggctcaagaggagatcctgcatcaggaaggccatagcatgggtgtgtatgacattgccttccatcaagatggctctttggctggcactgggggactggatgcatttggtcgagtttgggacctacgcacaggacgttgtatcatgttcttagaaggccacctgaaagaaatctatggaataaatttctcccccaatggctatcacattgcaaccggcagtggtgacaacacctgcaaagtgtgggacctccgacagcggcgttgcgtctacaccatccctgctcatcagaacttagtgactggtgtcaagtttgagcctatccatgggaacttcttgcttactggtgcctatgataacacagccaagatctggacgcacccaggctggtccccgctgaagactctggctggccacgaaggcaaagtgatgggcctagatatttcttccgatgggcagctcatagccacttgctcatatgacaggaccttcaagctgtggatggctgaatagatgacaatgggaaaaggacttgaacctcaagctctctctaaggagctgttttcctcaaacgagaagaattgaagtgtttagttctatcatgttttctgccaattaccatgcatagaccctcagtagaattggatttccatgtcagcccccactccaggaaggcagcccaatccctaggtgatggggaacccctctcacggttgaaaatttattacctttttacgccctgccacgaactgtgtagacattgtttttattaatcttttgtttggccgggcgtggtggctcacgcctgtaatcctagcactttgggaggccgaggtgggtagatcgcttgagctcaggagttcaagacgagcctgggcaacatggcaaatgccgtctctgcaaaaaaatactaaaattagctggtcgcggtggcttctgcctgtgattccggctacttgggaggctgaggtgggagggattgcttaagcctgggaggcagaggttgcagtgagccgagattgcgccattgcactctagcctgtgtgacagagcaagaccctgtctcaaaaaaaaaaaaaatttgttcgaatgccttatagccttcctcacagcacccaggattgtgactgactctgcatttttaattcttgaaacttggctttccataacatggtacatgcttcaggactacatatgacccagagagcaaggtggctgaactatagtctggaagccctcaggtaaagaggcacatctcaccactcattggttaaacaatgcatcatagcgagcacttttcctttccctggagaatgggatgtgaagcagtagaccgcagccacgccgatggttatacagtgaagaagacttcacctcttcctattgagtttgcttggaatgctgacagcatcaggcaactctgaactgaacatttgctttgtcagaaaatatctttttttttactttgaagtttggcaaccttcatgttaccccaaagcaaaaccattgtgtcaggagtcaaacaaatgtttagaaagcaaacatgacgtctctattgtacaacctcctttctcttggctgtttaaaggatgtacttcgtgtattaaagggtactttatgttgaagtaacgaaaaaaccctaatgggtgttcctaaacctaaaccttttctttattccacatttgctacggtaaaatcctgttacaaaactaccctataaagaattattttctatagttaagcattttctgaatccta

SEQ ID NO: 13607 - DNA, 4081 bp, Homo sapiens
actttttggagagggtcctgctgaaagaagagaaaggttgcctttctaaatatttactttttttctttattataatcacagggttctactccaaattttggttgatcatttagttgaactttaatagaatgtctcaaatcatgttaacaatatcttactgtgtttatatgagttagcccataatctgtcttaggccaatttttaccgcactattaatgtttcttttttgtgtttgttcgtttttgttttgttttgttttgttttgttttgttttgttttgtgttttgagacagagtcttgctctgtcacccaggcttgagtgcagcgtcgtgatctcggctcactgcagcctccgcctcccgggttcaagcgattttcctgcctcagcctcccaagtggctgggattacaggcacctgccaccacatttttcttttttgtatttttagttattttttatatttttgtatttttagtagagacagggtttcaccatgttggccaggctggtcttgaactcctaacctcaaatgatttacccaccttggcctcccaaagtgctgggattacaagcgtgagccttcgtgcctggcccgtttttctttatagacttggaagagggtgctaacatgctcccttgcctcccctccccagtgcgagttttgaattggataaacatttgttgttgggctttgaaaattgagacatcaaatgcattccatatcaatgacatagaacaatgataaatgtttcttggattttattgaagaggggtaccatcctcagataatgccctcttgttatttgcaggttgcgaagtcttagttgtggtctagtcacacacaattatgaggagcccctctggtctctctgtccactgtctcatctacccttcatcatccagcttgttggaagggttttttctattactcccttgaggtccttacccttatttactcttcaacctgctgcaaactgaccaacccctaccacattaaaattgctctttgttaagatcaccaatccacctttactaagaatagccctagtatactgccagccactcctccttgaaatactccctccttgaactactccctttccttcactctcctaataacaaatcctcttgattttcctcttctctcactagctaattcttctcacttaccttctaaacctctttttctctgcctgccctttacaggctgcctttttctctacttgcccttggtgatcagctctactcccatggcatcattcactgtgtgttctgatgattcccaaatctctcactgcagcttaggtatcccacaggtacttcaaacttgagacatctgaattgaaatatttccccacctctctcctatactcatacaattcttagttgaaaatctgcctagcctcctttataatccattagcaaaatctggtctgttctacttgcgagatacaactccagctatcttctttgctctatctttactgctttcaaatctgcactgttgtgatagccccaaacatgttgtgttaattgcttgcttaaaatcctagattgtcttctcatacttggagtaaaaaactcttaccatggtctgtaaggtcttcagccttactcatgtctcccttccccaatttactagaatagccacattggtccttatggaatatgctagttctttttatgtctttccacataattggtctacttttattcttctgtcttgtcttttagaggctttttttcttcctttttttttctttgaaacggagtctcgctctgtcacccagggtggagtgcggtggtgcaatctcagctcactgcaacctccacctcccaggtacaagccattctcctgcctcagcctcccaagtagctgggactacaggcatgtgccaccatgcctggctaatttctgtatttttagtagagacggggtttcaacacgttggccaggtgttgaacacctcctcaagtgatcctctcaacacctcctcaagtgatccgcctgcctgggcctcccaaagtgctgggattacagatgtgagctaccgcgcccggcctttcttcttcattttttattaacctggatccctgtcaaacttcttattctttcgtttcagcatagatgccacctattcaaagaagcctttcgtcacacctaacccctctgttctctgtcatagtatgttattttattagccttttcaaagggtatacttttttattattgtttagtttgttttttccaccagcaaagtctatcttattcattattatgttccttaaatgaatcctttgagtcactactgctactatctgaatttcagtccacggttgtgactcagagcgtcactacaacagtactgtctgatttccctgccattattcttcccttttaatccattctttgtactgtttcagggatctttctcatctgtaaatcctcctgagcgtggcattagcaattctttgtgacctggctcctccttgcatttgcagccctattcttcaccagtcctcttctatgttctacgctccagccatattgaattatttgtgactgcaagctcaacatgtttttcttacctccaggccttatttgtttaaccctctgcctgacattttctcattcttgacccccttgacctgattaactgaggactcaatttacatattacctttttttaatgaagccttccctgatcctctaagcttagttagatgcccgttacaaagtcccctctagccctctgtgcttactgctatagtgataggtaatataatggattatagtttgccagtactctctgttgtttccccaggactaagctacttgaaatcaagaactgattcctagtcatcactgtatagttagcacctgagtcagtatccagtacattgtggcactgagtgaaagttggcagtcttcacagaccaagtggtagcagtgtaggggctcattgactctaaactgtatagagtaattgcttatagttgaattttggaaatttccaaatagagaagactgagtgggagaaaccacactgggagtttagccatccccacttgactcttaaagaaggttcctggagggccgggtatagtggctcatgcccgtaatcccagcactttgggaggctgaggcaggaggatcacttgagcccagaagttcaagacttgcctgggcaacatagcaagcccttctctctacagaaaaatttaaaaattagccagttgtagcagtgtacatgtagtcccagccactcgggaggctggagtgggaggatcgcttgagctcaggaggttgaggctgcagtgacccatgatcatgccactgcactccaccctgggcaacaacaagacctcatctcttaaaaagaaaaaaaaaaggttgctaggtggtttgaacagtgagagaatagtaaaggcttgctcccatcttaggggaactttaataacagtgtttaaaactgtgttaaagtgtactttaaaaacagtattatctcaaccatgtttaaattctgatctttttttttttttttaacaggttaagaaatatcctctcagttgtcggtactgatgccttgaaaaagaccaaaaaggatgatgagaagtctaaaaagtccaaagaagaggtagaacatgtctttaacttcacagtataaacatgaaggaaatgaggggataggtctctcgttttctgctttcaatggtttgttttgctgagatgttgggggaaatgtttttgaaggctctaccattcaagaagagttgctggcagtagttttggttcctttgtaagtatgaatggagctaagtgagttttccagtcaggaaagaatcatggcattcctggtataaccatgtagttacatatcatagaaaaaaattcagtagaaagtcctctgcctgatttcatcctattaccgaatgaattcaccttccttctgggcagttaaaatggagaaatgacagttataagaggagtagaatgcttcagatttgacctttctgctcttaatttgcctttcagtatcagcaaacctggtatcatgaaggaccaaatagcttgaaggtg

SEQ ID NO: 13608 - DNA, 567 bp, Homo sapiens
actttttggagagggtcctgctgaaagaagagaaaggttaagaaatatcctctcagttgtcggtactgatgccttgaaaaagaccaaaaaggatgatgagaagtctaaaaagtccaaagaagaggtagaacatgtctttaacttcacagtataaacatgaaggaaatgaggggataggtctctcgttttctgctttcaatggtttgttttgctgagatgttgggggaaatgtttttgaaggctctaccattcaagaagagttgctggcagtagttttggttcctttgtaagtatgaatggagctaagtgagttttccagtcaggaaagaatcatggcattcctggtataaccatgtagttacatatcatagaaaaaaattcagtagaaagtcctctgcctgatttcatcctattaccgaatgaattcaccttccttctgggcagttaaaatggagaaatgacagttataagaggagtagaatgcttcagatttgacctttctgctcttaatttgcctttcagtatcagcaaacctggtatcatgaaggaccaaatagcttgaaggtg

SEQ ID NO: 13609 - DNA, 4910 bp, Homo sapiens
ctgggtgcgggtgccgcgtggcggccgcagcgctgaggggtgggtacgacccgcgcacggtagctgggttggggtcgggctccgggaatggtgggcggcggtcgccgggtggggcgcgacggtagcccagttctgggcggggtgggaacccagacgggggacccctaggcgccgggccctccctctccccgtacttttcccccttcccagtcatttcttctgcggaacctccacccctccagtgggtgcgggaccctaggcagcaggccaggcaccgccgctctgactgggggccccgaagcagttaacgggccggacagcaaagtggaaagttagaccagctgggaccaggggaggtgggcacccggctgcgggaggagcggccaggctggcactgcccccctaacttgctctcgatcctgccggtctcgtcccgcagagccggtgccatctgtgggggctttgggccaggggtctccggacagcatgagcgtgggcttcatcggcgctggccagctggcttttgccctggccaagggcttcacagcagcaggtaggcccccaggtgggggacggtgaggcccagtgggagagactggcctctttccacttctgcagggctgggggctgaaggtgggtgctgggtcacaaggcctgagtcctgcgggaactggcaacttctgtgtgtttggggctttacctgtgctgtctcactcttcttcctgggaatggggagggagggaagccaaagctagccatgaagaggaactgtttccggccgggcgcggtggctcacgcctgtaatcccagcactttgggaggccgaggcgggcggatcacgaggtcaggagatcgagaccatcctggctaacacagtgaaaccccgtctctactaaaaataccaaaaattagccgggtgtggtggcgggcgcctgtagtcccagctactcgggaggctgaggcaggagcatggcgtgaacccgggaggtggagcttgcagtgagccgagattgcgccactgcactccagcctgggcaacacagcgagactccgtctcaaaaaaaaaaaaataataaagaactgaagaggaactgtttctcccctcaggcgtcttggctgcccacaagataatggctagctccccagacatggacctggccacagtttctgctctcagggtaggtgcagatgaaagggagaaaggagactgagtccctgtggggctgggtgtgagaggcaggagtgtgtgctgtagcccccaccccagtgagggcaggggccctgggctggggtctcatggaccccacctcctcgccctgctgattgctcttgggacctgggtggtgggcgtgtgtacagctgataggagggtgttgttctggaatggagttccctgcacagggttaaagtttcgaggggtcctctgggggcctggcaggtggggccacagcctggcagccaaggaacacacctgggggctgcttgagaccaccactcccacgtggagagcccggtctggaggacggcagtcccaggctgggggcagattggtggcatggatggagggtccttttctgtctgcagcagggacatattccacacagagttcttcctccatttctgggtgggaagggtcatcaagggggtggtcagagccctgagcccccagccctgcccacccccaactccagcattctctgtgccattctacctgtggggctcttggcttggtgggggtacagacagccacgggaccaggctgagcccacctgttgcccctgcagaagatgggggtgaagttgacaccccacaacaaggagacggtgcagcacagtgatgtgctcttcctggctgtgaagccacacatcatccccttcatcctggatgaaataggcgccgacattgaggacagacacattgtggtgtcctgcgcggccggcgtcaccatcagctccattgagaaggtagcaccgcaggcccagtggggtgtggagaggggctgtctagagcccgggccctcagtacttcagttttcatctgcaaaagggttgcagcgtcccggcccactgggagagctcgggcactgcttggtggggtgagtgcatctaggcactgcgtccatggccagacggacacgctggtttctcttccagaagctgtcagcgtttcggccagcccccagggtcatccgctgcatgaccaacactccagtcgtggtgcgggagggggccaccgtgtatgccacaggcacgcacgcccaggtggaggacgggaggctcatggagcagctgctgagcagcgtgggcttctgcacggaggtggaagaggacctgattgatgccgtcacggggctcagtggcagcggccccgcctacgtaaggactgcgggggaagctggcggcggcgggcacttcccgggaccaccgggcacatctgtccctgctccccctgggagggccagggtggagggctccaaggctgtgggaactggagcttgcccagaagggaaggaggagaagcccaggagagaggctcagggtgccttctccccacaggcattcacagccctggatgccctggctgatgggggtgtgaagatgggacttccaaggcgcctggcagtccgcctcggggcccaggccctcctggtcagtgtgtttcctgaccctctggtggggccactctttgcggggccctggggcttcactgggaggagccaagtggggcgtcagtgtgtgctacagtggctggggcagtgccccgcagaggcaggtgcgtgcccacagccgtcagcctttcttctggctgcagggggctgccaagatgctgctgcactcagaacagcacccaggccagctcaaggacaacgtcagctctcctggtggggccaccatccatgccttgcatgtgctggagagtgggggcttccgctccctgctcatcaacgctgtggaggcctcctgcatccgcacacggtgggcccccgcgctgcccgcttccctggtctccagtccttgcatggcagaggcctctctcacacacatctgctcattcacgcactcagcagatacgtattgagctccagcccagtgttgcgcaggacacagggggccccgaggttccctgggttactgtgggcagtgcccctccccaccttccgtttcctgcgaggagggaacatccatagagggacccggatgctgtgccctgtgctccccacataggttcaccattgtcatagctaggagtgtcatttgagccaggggccacaccagtggggtggcggggtggccagccacattaggaaacttctgtgggggcccaccttcctcctgccctcgctgtgggattaagttagaccagtaggacacgcagcaacatccaggcacaaggaaaattccatggaaggtgaaagaagcaaagagcaagagaaagacagagtttgctgtttgcctgggatcccacagctggtcaaaggcagagccaggctgggagccgctgtccccagttcaggtctgcagggtgggtgaggacgtctttctcgccacactgcccactctccagtccagacaccctcagactctgcgagtgccaccctgtaacagtgaggggaacacgaggggcctggcctcacctccagcctgcaggggagacaggtgtaaacccacatcccgtggtggggccacgagaactcaggtctggggggcactgcggggagatttggtgatgctgagctgattcgaatgaggtgagaaggagcccagcagctgtgtgggggcgtgtcgctggcagaggggaataaaggtgctgaggtgagggtgacagcatcgcccagggctgactggcactgggagctgtgggcttcactccctcttcctgggtgcacgcttgtgctccaaagccaacctctccctgcctctctagggagctgcagtccatggctgaccaggagcaggtgtcaccagccgccatcaagaagaccatcctggacaaggtgaagctggactcccctgcagggaccgctctgtcaccttctggccacaccaagctgctcccccgcagcctggccccagcgggcaaggattgacacgtcctgcctgaccaccatcctgccaccaccttctcttctcttgtcactagggggactagggggtccccaaagtggcccactttctgtggctctgatcagcgcaggggccagccagggacatagccagggaggggccacatcacttcccactggaaatctctgtggtctgcaagtgcttcccagcccagaacaggggtggattccccaacctcaacctcctttcttctctgctcccaaaccatgtcaggaccaccttcctctagagctcgggagcccggagggtcttcacccactcctactccagtatcagctggcacgggctccttcctgagagcaaaggtcaaggaccccctctgtgaaggctcagcagaggtgggatcccacgccccctcccggcccctccctgccctccattcagggagaaacctctccttcccgtgtgagaagggccagagggtccaggcatcccaagtccagcgtgaagggccacagcccctcttggctgccaagcacgcagatcccatggacatttggggaaagggctccttgggctgctggtgaacttctgtggccaccacctcctgctcctgacctccctgggagggtgctatcagttctgtcctggccctttcagttttataagttggtttccagcccccagtgtcctgacttctgtctgccacatgaggagggaggccctgcctgtgtgggagggtggttactgtgggtggaatagtggaggccttcaactgattagacaaggcccgcccacatcttggagggcatctgccttactgattaaaatgtcaatgtaatctaa

SEQ ID NO: 13610 - DNA, 2269 bp, Homo sapiens
ctgggtgcgggtgccgcgtggcggccgcagcgctgaggggtgggtacgacccgcgcacggtagctgggttggggtcgggctccgggaatggtgggcggcggtcgccgggtggggcgcgacggtagcccagttctgggcggggtgggaacccagacgggggacccctaggcgccgggccctccctctccccgtacttttcccccttcccagtcatttcttctgcggaacctccacccctccagtgggtgcgggaccctaggcagcaggccaggcaccgccgctctgactgggggccccgaagcagttaacgggccggacagcaaagtggaaagttagaccagctgggaccaggggaggtgggcacccggctgcgggaggagcggccaggctggcactgcccccctaacttgctctcgatcctgccggtctcgtcccgcagagccggtgccatctgtgggggctttgggccaggggtctccggacagcatgagcgtgggcttcatcggcgctggccagctggcttttgccctggccaagggcttcacagcagcaggcgtcttggctgcccacaagataatggctagctccccagacatggacctggccacagtttctgctctcaggaagatgggggtgaagttgacaccccacaacaaggagacggtgcagcacagtgatgtgctcttcctggctgtgaagccacacatcatccccttcatcctggatgaaataggcgccgacattgaggacagacacattgtggtgtcctgcgcggccggcgtcaccatcagctccattgagaagaagctgtcagcgtttcggccagcccccagggtcatccgctgcatgaccaacactccagtcgtggtgcgggagggggccaccgtgtatgccacaggcacgcacgcccaggtggaggacgggaggctcatggagcagctgctgagcagcgtgggcttctgcacggaggtggaagaggacctgattgatgccgtcacggggctcagtggcagcggccccgcctacgcattcacagccctggatgccctggctgatgggggtgtgaagatgggacttccaaggcgcctggcagtccgcctcggggcccaggccctcctgggggctgccaagatgctgctgcactcagaacagcacccaggccagctcaaggacaacgtcagctctcctggtggggccaccatccatgccttgcatgtgctggagagtgggggcttccgctccctgctcatcaacgctgtggaggcctcctgcatccgcacacgggagctgcagtccatggctgaccaggagcaggtgtcaccagccgccatcaagaagaccatcctggacaaggtgaagctggactcccctgcagggaccgctctgtcaccttctggccacaccaagctgctcccccgcagcctggccccagcgggcaaggattgacacgtcctgcctgaccaccatcctgccaccaccttctcttctcttgtcactagggggactagggggtccccaaagtggcccactttctgtggctctgatcagcgcaggggccagccagggacatagccagggaggggccacatcacttcccactggaaatctctgtggtctgcaagtgcttcccagcccagaacaggggtggattccccaacctcaacctcctttcttctctgctcccaaaccatgtcaggaccaccttcctctagagctcgggagcccggagggtcttcacccactcctactccagtatcagctggcacgggctccttcctgagagcaaaggtcaaggaccccctctgtgaaggctcagcagaggtgggatcccacgccccctcccggcccctccctgccctccattcagggagaaacctctccttcccgtgtgagaagggccagagggtccaggcatcccaagtccagcgtgaagggccacagcccctcttggctgccaagcacgcagatcccatggacatttggggaaagggctccttgggctgctggtgaacttctgtggccaccacctcctgctcctgacctccctgggagggtgctatcagttctgtcctggccctttcagttttataagttggtttccagcccccagtgtcctgacttctgtctgccacatgaggagggaggccctgcctgtgtgggagggtggttactgtgggtggaatagtggaggccttcaactgattagacaaggcccgcccacatcttggagggcatctgccttactgattaaaatgtcaatgtaatctaa

SEQ ID NO: 13611 - DNA, 4874 bp, Homo sapiens
gtacgacccgcgcacggtagctgggttggggtcgggctccgggaatggtgggcggcggtcgccgggtggggcgcgacggtagcccagttctgggcggggtgggaacccagacgggggacccctaggcgccgggccctccctctccccgtacttttcccccttcccagtcatttcttctgcggaacctccacccctccagtgggtgcgggaccctaggcagcaggccaggcaccgccgctctgactgggggccccgaagcagttaacgggccggacagcaaagtggaaagttagaccagctgggaccaggggaggtgggcacccggctgcgggaggagcggccaggctggcactgcccccctaacttgctctcgatcctgccggtctcgtcccgcagagccggtgccatctgtgggggctttgggccaggggtctccggacagcatgagcgtgggcttcatcggcgctggccagctggcttttgccctggccaagggcttcacagcagcaggtaggcccccaggtgggggacggtgaggcccagtgggagagactggcctctttccacttctgcagggctgggggctgaaggtgggtgctgggtcacaaggcctgagtcctgcgggaactggcaacttctgtgtgtttggggctttacctgtgctgtctcactcttcttcctgggaatggggagggagggaagccaaagctagccatgaagaggaactgtttccggccgggcgcggtggctcacgcctgtaatcccagcactttgggaggccgaggcgggcggatcacgaggtcaggagatcgagaccatcctggctaacacagtgaaaccccgtctctactaaaaataccaaaaattagccgggtgtggtggcgggcgcctgtagtcccagctactcgggaggctgaggcaggagcatggcgtgaacccgggaggtggagcttgcagtgagccgagattgcgccactgcactccagcctgggcaacacagcgagactccgtctcaaaaaaaaaaaaataataaagaactgaagaggaactgtttctcccctcaggcgtcttggctgcccacaagataatggctagctccccagacatggacctggccacagtttctgctctcagggtaggtgcagatgaaagggagaaaggagactgagtccctgtggggctgggtgtgagaggcaggagtgtgtgctgtagcccccaccccagtgagggcaggggccctgggctggggtctcatggaccccacctcctcgccctgctgattgctcttgggacctgggtggtgggcgtgtgtacagctgataggagggtgttgttctggaatggagttccctgcacagggttaaagtttcgaggggtcctctgggggcctggcaggtggggccacagcctggcagccaaggaacacacctgggggctgcttgagaccaccactcccacgtggagagcccggtctggaggacggcagtcccaggctgggggcagattggtggcatggatggagggtccttttctgtctgcagcagggacatattccacacagagttcttcctccatttctgggtgggaagggtcatcaagggggtggtcagagccctgagcccccagccctgcccacccccaactccagcattctctgtgccattctacctgtggggctcttggcttggtgggggtacagacagccacgggaccaggctgagcccacctgttgcccctgcagaagatgggggtgaagttgacaccccacaacaaggagacggtgcagcacagtgatgtgctcttcctggctgtgaagccacacatcatccccttcatcctggatgaaataggcgccgacattgaggacagacacattgtggtgtcctgcgcggccggcgtcaccatcagctccattgagaaggtagcaccgcaggcccagtggggtgtggagaggggctgtctagagcccgggccctcagtacttcagttttcatctgcaaaagggttgcagcgtcccggcccactgggagagctcgggcactgcttggtggggtgagtgcatctaggcactgcgtccatggccagacggacacgctggtttctcttccagaagctgtcagcgtttcggccagcccccagggtcatccgctgcatgaccaacactccagtcgtggtgcgggagggggccaccgtgtatgccacaggcacgcacgcccaggtggaggacgggaggctcatggagcagctgctgagcagcgtgggcttctgcacggaggtggaagaggacctgattgatgccgtcacggggctcagtggcagcggccccgcctacgtaaggactgcgggggaagctggcggcggcgggcacttcccgggaccaccgggcacatctgtccctgctccccctgggagggccagggtggagggctccaaggctgtgggaactggagcttgcccagaagggaaggaggagaagcccaggagagaggctcagggtgccttctccccacaggcattcacagccctggatgccctggctgatgggggtgtgaagatgggacttccaaggcgcctggcagtccgcctcggggcccaggccctcctggtcagtgtgtttcctgaccctctggtggggccactctttgcggggccctggggcttcactgggaggagccaagtggggcgtcagtgtgtgctacagtggctggggcagtgccccgcagaggcaggtgcgtgcccacagccgtcagcctttcttctggctgcagggggctgccaagatgctgctgcactcagaacagcacccaggccagctcaaggacaacgtcagctctcctggtggggccaccatccatgccttgcatgtgctggagagtgggggcttccgctccctgctcatcaacgctgtggaggcctcctgcatccgcacacggtgggcccccgcgctgcccgcttccctggtctccagtccttgcatggcagaggcctctctcacacacatctgctcattcacgcactcagcagatacgtattgagctccagcccagtgttgcgcaggacacagggggccccgaggttccctgggttactgtgggcagtgcccctccccaccttccgtttcctgcgaggagggaacatccatagagggacccggatgctgtgccctgtgctccccacataggttcaccattgtcatagctaggagtgtcatttgagccaggggccacaccagtggggtggcggggtggccagccacattaggaaacttctgtgggggcccaccttcctcctgccctcgctgtgggattaagttagaccagtaggacacgcagcaacatccaggcacaaggaaaattccatggaaggtgaaagaagcaaagagcaagagaaagacagagtttgctgtttgcctgggatcccacagctggtcaaaggcagagccaggctgggagccgctgtccccagttcaggtctgcagggtgggtgaggacgtctttctcgccacactgcccactctccagtccagacaccctcagactctgcgagtgccaccctgtaacagtgaggggaacacgaggggcctggcctcacctccagcctgcaggggagacaggtgtaaacccacatcccgtggtggggccacgagaactcaggtctggggggcactgcggggagatttggtgatgctgagctgattcgaatgaggtgagaaggagcccagcagctgtgtgggggcgtgtcgctggcagaggggaataaaggtgctgaggtgagggtgacagcatcgcccagggctgactggcactgggagctgtgggcttcactccctcttcctgggtgcacgcttgtgctccaaagccaacctctccctgcctctctagggagctgcagtccatggctgaccaggagcaggtgtcaccagccgccatcaagaagaccatcctggacaaggtgaagctggactcccctgcagggaccgctctgtcaccttctggccacaccaagctgctcccccgcagcctggccccagcgggcaaggattgacacgtcctgcctgaccaccatcctgccaccaccttctcttctcttgtcactagggggactagggggtccccaaagtggcccactttctgtggctctgatcagcgcaggggccagccagggacatagccagggaggggccacatcacttcccactggaaatctctgtggtctgcaagtgcttcccagcccagaacaggggtggattccccaacctcaacctcctttcttctctgctcccaaaccatgtcaggaccaccttcctctagagctcgggagcccggagggtcttcacccactcctactccagtatcagctggcacgggctccttcctgagagcaaaggtcaaggaccccctctgtgaaggctcagcagaggtgggatcccacgccccctcccggcccctccctgccctccattcagggagaaacctctccttcccgtgtgagaagggccagagggtccaggcatcccaagtccagcgtgaagggccacagcccctcttggctgccaagcacgcagatcccatggacatttggggaaagggctccttgggctgctggtgaacttctgtggccaccacctcctgctcctgacctccctgggagggtgctatcagttctgtcctggccctttcagttttataagttggtttccagcccccagtgtcctgacttctgtctgccacatgaggagggaggccctgcctgtgtgggagggtggttactgtgggtggaatagtggaggccttcaactgattagacaaggcccgcccacatcttggagggcatctgccttactgattaaaatgtcaatgtaatctaatgcaaaa

SEQ ID NO: 13612 - DNA, 1890 bp, Homo sapiens
gtacgacccgcgcacggtagctgggttggggtcgggctccgggaatggtgggcggcggtcgccgggtggggcgcgacggtagcccagttctgggcggggtgggaacccagacgggggacccctaggcgccgggccctccctctccccgtacttttcccccttcccagtcatttcttctgcggaacctccacccctccagtgggtgcgggaccctaggcagcaggccaggcaccgccgctctgactgggggccccgaagcagttaacgggccggacagcaaagtggaaagttagaccagctgggaccaggggaggtgggcacccggctgcgggaggagcggccaggctggcactgcccccctaacttgctctcgatcctgccggtctcgtcccgcagagccggtgccatctgtgggggctttgggccaggggtctccggacagcatgagcgtgggcttcatcggcgctggccagctggcttttgccctggccaagggcttcacagcagcaggcgtcttggctgcccacaagataatggctagctccccagacatggacctggccacagtttctgctctcaggaagatgggggtgaagttgacaccccacaacaaggagacggtgcagcacagtgatgtgctcttcctggctgtgaagccacacatcatccccttcatcctggatgaaataggcgccgacattgaggacagacacattgtggtgtcctgcgcggccggcgtcaccatcagctccattgagaagaagctgtcagcgtttcggccagcccccagggtcatccgctgcatgaccaacactccagtcgtggtgcgggagggggccaccgtgtatgccacaggcacgcacgcccaggtggaggacgggaggctcatggagcagctgctgagcagcgtgggcttctgcacggaggtggaagaggacctgattgatgccgtcacggggctcagtggcagcggccccgcctacgcattcacagccctggatgccctggctgatgggggtgtgaagatgggacttccaaggcgcctggcagtccgcctcggggcccaggccctcctgggggctgccaagatgctgctgcactcagaacagcacccaggccagctcaaggacaacgtcagctctcctggtggggccaccatccatgccttgcatgtgctggagagtgggggcttccgctccctgctcatcaacgctgtggaggcctcctgcatccgcacacgggagctgcagtccatggctgaccaggagcaggtgtcaccagccgccatcaagaagaccatcctggacaaggaccaccttcctctagagctcgggagcccggagggtcttcacccactcctactccagtatcagctggcacgggctccttcctgagagcaaaggtcaaggaccccctctgtgaaggctcagcagaggtgggatcccacgccccctcccggcccctccctgccctccattcagggagaaacctctccttcccgtgtgagaagggccagagggtccaggcatcccaagtccagcgtgaagggccacagcccctcttggctgccaagcacgcagatcccatggacatttggggaaagggctccttgggctgctggtgaacttctgtggccaccacctcctgctcctgacctccctgggagggtgctatcagttctgtcctggccctttcagttttataagttggtttccagcccccagtgtcctgacttctgtctgccacatgaggagggaggccctgcctgtgtgggagggtggttactgtgggtggaatagtggaggccttcaactgattagacaaggcccgcccacatcttggagggcatctgccttactgattaaaatgtcaatgtaatctaatgcaaaa

SEQ ID NO: 13613 - DNA, 4305 bp, Homo sapiens
agctgggttggggtcgggctccgggaatggtgggcggcggtcgccgggtggggcgcgacggtagcccagttctgggcggggtgggaacccagacgggggacccctaggcgccgggccctccctctccccgtacttttcccccttcccagtcatttcttctgcggaacctccacccctccagtgggtgcgggaccctaggcagcaggccaggcaccgccgctctgactgggggccccgaagcagttaacgggccggacagcaaagtggaaagttagaccagctgggaccaggggaggtgggcacccggctgcgggaggagcggccaggctggcactgcccccctaacttgctctcgatcctgccggtctcgtcccgcagagccggtgccatctgtgggggctttgggccaggggtctccggacagcatgagcgtgggcttcatcggcgctggccagctggcttttgccctggccaagggcttcacagcagcaggtaggcccccaggtgggggacggtgaggcccagtgggagagactggcctctttccacttctgcagggctgggggctgaaggtgggtgctgggtcacaaggcctgagtcctgcgggaactggcaacttctgtgtgtttggggctttacctgtgctgtctcactcttcttcctgggaatggggagggagggaagccaaagctagccatgaagaggaactgtttccggccgggcgcggtggctcacgcctgtaatcccagcactttgggaggccgaggcgggcggatcacgaggtcaggagatcgagaccatcctggctaacacagtgaaaccccgtctctactaaaaataccaaaaattagccgggtgtggtggcgggcgcctgtagtcccagctactcgggaggctgaggcaggagcatggcgtgaacccgggaggtggagcttgcagtgagccgagattgcgccactgcactccagcctgggcaacacagcgagactccgtctcaaaaaaaaaaaaataataaagaactgaagaggaactgtttctcccctcaggcgtcttggctgcccacaagataatggctagctccccagacatggacctggccacagtttctgctctcagggtaggtgcagatgaaagggagaaaggagactgagtccctgtggggctgggtgtgagaggcaggagtgtgtgctgtagcccccaccccagtgagggcaggggccctgggctggggtctcatggaccccacctcctcgccctgctgattgctcttgggacctgggtggtgggcgtgtgtacagctgataggagggtgttgttctggaatggagttccctgcacagggttaaagtttcgaggggtcctctgggggcctggcaggtggggccacagcctggcagccaaggaacacacctgggggctgcttgagaccaccactcccacgtggagagcccggtctggaggacggcagtcccaggctgggggcagattggtggcatggatggagggtccttttctgtctgcagcagggacatattccacacagagttcttcctccatttctgggtgggaagggtcatcaagggggtggtcagagccctgagcccccagccctgcccacccccaactccagcattctctgtgccattctacctgtggggctcttggcttggtgggggtacagacagccacgggaccaggctgagcccacctgttgcccctgcagaagatgggggtgaagttgacaccccacaacaaggagacggtgcagcacagtgatgtgctcttcctggctgtgaagccacacatcatccccttcatcctggatgaaataggcgccgacattgaggacagacacattgtggtgtcctgcgcggccggcgtcaccatcagctccattgagaaggtagcaccgcaggcccagtggggtgtggagaggggctgtctagagcccgggccctcagtacttcagttttcatctgcaaaagggttgcagcgtcccggcccactgggagagctcgggcactgcttggtggggtgagtgcatctaggcactgcgtccatggccagacggacacgctggtttctcttccagaagctgtcagcgtttcggccagcccccagggtcatccgctgcatgaccaacactccagtcgtggtgcgggagggggccaccgtgtatgccacaggcacgcacgcccaggtggaggacgggaggctcatggagcagctgctgagcagcgtgggcttctgcacggaggtggaagaggacctgattgatgccgtcacggggctcagtggcagcggccccgcctacgtaaggactgcgggggaagctggcggcggcgggcacttcccgggaccaccgggcacatctgtccctgctccccctgggagggccagggtggagggctccaaggctgtgggaactggagcttgcccagaagggaaggaggagaagcccaggagagaggctcagggtgccttctccccacaggcattcacagccctggatgccctggctgatgggggtgtgaagatgggacttccaaggcgcctggcagtccgcctcggggcccaggccctcctggtcagtgtgtttcctgaccctctggtggggccactctttgcggggccctggggcttcactgggaggagccaagtggggcgtcagtgtgtgctacagtggctggggcagtgccccgcagaggcaggtgcgtgcccacagccgtcagcctttcttctggctgcagggggctgccaagatgctgctgcactcagaacagcacccaggccagctcaaggacaacgtcagctctcctggtggggccaccatccatgccttgcatgtgctggagagtgggggcttccgctccctgctcatcaacgctgtggaggcctcctgcatccgcacacggtgggcccccgcgctgcccgcttccctggtctccagtccttgcatggcagaggcctctctcacacacatctgctcattcacgcactcagcagatacgtattgagctccagcccagtgttgcgcaggacacagggggccccgaggttccctgggttactgtgggcagtgcccctccccaccttccgtttcctgcgaggagggaacatccatagagggacccggatgctgtgccctgtgctccccacataggttcaccattgtcatagctaggagtgtcatttgagccaggggccacaccagtggggtggcggggtggccagccacattaggaaacttctgtgggggcccaccttcctcctgccctcgctgtgggattaagttagaccagtaggacacgcagcaacatccaggcacaaggaaaattccatggaaggtgaaagaagcaaagagcaagagaaagacagagtttgctgtttgcctgggatcccacagctggtcaaaggcagagccaggctgggagccgctgtccccagttcaggtctgcagggtgggtgaggacgtctttctcgccacactgcccactctccagtccagacaccctcagactctgcgagtgccaccctgtaacagtgaggggaacacgaggggcctggcctcacctccagcctgcaggggagacaggtgtaaacccacatcccgtggtggggccacgagaactcaggtctggggggcactgcggggagatttggtgatgctgagctgattcgaatgaggtgagaaggagcccagcagctgtgtgggggcgtgtcgctggcagaggggaataaaggtgctgaggtgagggtgacagcatcgcccagggctgactggcactgggagctgtgggcttcactccctcttcctgggtgcacgcttgtgctccaaagccaacctctccctgcctctctagggagctgcagtccatggctgaccaggagcaggtgtcaccagccgccatcaagaagaccatcctggacaaggtgaagctggactcccctgcagggaccgctctgtcaccttctggccacaccaagctgctcccccgcagcctggccccagcgggcaaggattgacacgtcctgcctgaccaccatcctgccaccaccttctcttctcttgtcactagggggactagggggtccccaaagtggcccactttctgtggctctgatcagcgcaggggccagccagggacatagccagggaggggccacatcacttcccactggaaatctctgtggtctgcaagtgcttcccagcccagaacaggggtggattccccaacctcaacctcctttcttctctgctcccaaaccatgtcaggaccaccttcctctagagctcgggagccc

SEQ ID NO: 13614 - DNA, 1346 bp, Homo sapiens
agctgggttggggtcgggctccgggaatggtgggcggcggtcgccgggtggggcgcgacgagccggtgccatctgtgggggctttgggccaggggtctccggacagcatgagcgtgggcttcatcggcgctggccagctggcttttgccctggccaagggcttcacagcagcaggcgtcttggctgcccacaagataatggctagctccccagacatggacctggccacagtttctgctctcaggaagatgggggtgaagttgacaccccacaacaaggagacggtgcagcacagtgatgtgctcttcctggctgtgaagccacacatcatccccttcatcctggatgaaataggcgccgacattgaggacagacacattgtggtgtcctgcgcggccggcgtcaccatcagctccattgagaagaagctgtcagcgtttcggccagcccccagggtcatccgctgcatgaccaacactccagtcgtggtgcgggagggggccaccgtgtatgccacaggcacgcacgcccaggtggaggacgggaggctcatggagcagctgctgagcagcgtgggcttctgcacggaggtggaagaggacctgattgatgccgtcacggggctcagtggcagcggccccgcctacgcattcacagccctggatgccctggctgatgggggtgtgaagatgggacttccaaggcgcctggcagtccgcctcggggcccaggccctcctgggggctgccaagatgctgctgcactcagaacagcacccaggccagctcaaggacaacgtcagctctcctggtggggccaccatccatgccttgcatgtgctggagagtgggggcttccgctccctgctcatcaacgctgtggaggcctcctgcatccgcacacgggagctgcagtccatggctgaccaggagcaggtgtcaccagccgccatcaagaagaccatcctggacaaggtgaagctggactcccctgcagggaccgctctgtcaccttctggccacaccaagctgctcccccgcagcctggccccagcgggcaaggattgacacgtcctgcctgaccaccatcctgccaccaccttctcttctcttgtcactagggggactagggggtccccaaagtggcccactttctgtggctctgatcagcgcaggggccagccagggacatagccagggaggggccacatcacttcccactggaaatctctgtggtctgcaagtgcttcccagcccagaacaggggtggattccccaacctcaacctcctttcttctctgctcccaaaccatgtcaggaccaccttcctctagagctcgggagccc

SEQ ID NO: 13615 - DNA, 4945 bp, Homo sapiens
ggattcgctggcgcgacgggggcggggcctgggtgcgggtgccgcgtggcggccgcagcgctgaggggtgggtacgacccgcgcacggtagctgggttggggtcgggctccgggaatggtgggcggcggtcgccgggtggggcgcgacggtagcccagttctgggcggggtgggaacccagacgggggacccctaggcgccgggccctccctctccccgtacttttcccccttcccagtcatttcttctgcggaacctccacccctccagtgggtgcgggaccctaggcagcaggccaggcaccgccgctctgactgggggccccgaagcagttaacgggccggacagcaaagtggaaagttagaccagctgggaccaggggaggtgggcacccggctgcgggaggagcggccaggctggcactgcccccctaacttgctctcgatcctgccggtctcgtcccgcagagccggtgccatctgtgggggctttgggccaggggtctccggacagcatgagcgtgggcttcatcggcgctggccagctggcttttgccctggccaagggcttcacagcagcaggtaggcccccaggtgggggacggtgaggcccagtgggagagactggcctctttccacttctgcagggctgggggctgaaggtgggtgctgggtcacaaggcctgagtcctgcgggaactggcaacttctgtgtgtttggggctttacctgtgctgtctcactcttcttcctgggaatggggagggagggaagccaaagctagccatgaagaggaactgtttccggccgggcgcggtggctcacgcctgtaatcccagcactttgggaggccgaggcgggcggatcacgaggtcaggagatcgagaccatcctggctaacacagtgaaaccccgtctctactaaaaataccaaaaattagccgggtgtggtggcgggcgcctgtagtcccagctactcgggaggctgaggcaggagcatggcgtgaacccgggaggtggagcttgcagtgagccgagattgcgccactgcactccagcctgggcaacacagcgagactccgtctcaaaaaaaaaaaaataataaagaactgaagaggaactgtttctcccctcaggcgtcttggctgcccacaagataatggctagctccccagacatggacctggccacagtttctgctctcagggtaggtgcagatgaaagggagaaaggagactgagtccctgtggggctgggtgtgagaggcaggagtgtgtgctgtagcccccaccccagtgagggcaggggccctgggctggggtctcatggaccccacctcctcgccctgctgattgctcttgggacctgggtggtgggcgtgtgtacagctgataggagggtgttgttctggaatggagttccctgcacagggttaaagtttcgaggggtcctctgggggcctggcaggtggggccacagcctggcagccaaggaacacacctgggggctgcttgagaccaccactcccacgtggagagcccggtctggaggacggcagtcccaggctgggggcagattggtggcatggatggagggtccttttctgtctgcagcagggacatattccacacagagttcttcctccatttctgggtgggaagggtcatcaagggggtggtcagagccctgagcccccagccctgcccacccccaactccagcattctctgtgccattctacctgtggggctcttggcttggtgggggtacagacagccacgggaccaggctgagcccacctgttgcccctgcagaagatgggggtgaagttgacaccccacaacaaggagacggtgcagcacagtgatgtgctcttcctggctgtgaagccacacatcatccccttcatcctggatgaaataggcgccgacattgaggacagacacattgtggtgtcctgcgcggccggcgtcaccatcagctccattgagaaggtagcaccgcaggcccagtggggtgtggagaggggctgtctagagcccgggccctcagtacttcagttttcatctgcaaaagggttgcagcgtcccggcccactgggagagctcgggcactgcttggtggggtgagtgcatctaggcactgcgtccatggccagacggacacgctggtttctcttccagaagctgtcagcgtttcggccagcccccagggtcatccgctgcatgaccaacactccagtcgtggtgcgggagggggccaccgtgtatgccacaggcacgcacgcccaggtggaggacgggaggctcatggagcagctgctgagcagcgtgggcttctgcacggaggtggaagaggacctgattgatgccgtcacggggctcagtggcagcggccccgcctacgtaaggactgcgggggaagctggcggcggcgggcacttcccgggaccaccgggcacatctgtccctgctccccctgggagggccagggtggagggctccaaggctgtgggaactggagcttgcccagaagggaaggaggagaagcccaggagagaggctcagggtgccttctccccacaggcattcacagccctggatgccctggctgatgggggtgtgaagatgggacttccaaggcgcctggcagtccgcctcggggcccaggccctcctggtcagtgtgtttcctgaccctctggtggggccactctttgcggggccctggggcttcactgggaggagccaagtggggcgtcagtgtgtgctacagtggctggggcagtgccccgcagaggcaggtgcgtgcccacagccgtcagcctttcttctggctgcagggggctgccaagatgctgctgcactcagaacagcacccaggccagctcaaggacaacgtcagctctcctggtggggccaccatccatgccttgcatgtgctggagagtgggggcttccgctccctgctcatcaacgctgtggaggcctcctgcatccgcacacggtgggcccccgcgctgcccgcttccctggtctccagtccttgcatggcagaggcctctctcacacacatctgctcattcacgcactcagcagatacgtattgagctccagcccagtgttgcgcaggacacagggggccccgaggttccctgggttactgtgggcagtgcccctccccaccttccgtttcctgcgaggagggaacatccatagagggacccggatgctgtgccctgtgctccccacataggttcaccattgtcatagctaggagtgtcatttgagccaggggccacaccagtggggtggcggggtggccagccacattaggaaacttctgtgggggcccaccttcctcctgccctcgctgtgggattaagttagaccagtaggacacgcagcaacatccaggcacaaggaaaattccatggaaggtgaaagaagcaaagagcaagagaaagacagagtttgctgtttgcctgggatcccacagctggtcaaaggcagagccaggctgggagccgctgtccccagttcaggtctgcagggtgggtgaggacgtctttctcgccacactgcccactctccagtccagacaccctcagactctgcgagtgccaccctgtaacagtgaggggaacacgaggggcctggcctcacctccagcctgcaggggagacaggtgtaaacccacatcccgtggtggggccacgagaactcaggtctggggggcactgcggggagatttggtgatgctgagctgattcgaatgaggtgagaaggagcccagcagctgtgtgggggcgtgtcgctggcagaggggaataaaggtgctgaggtgagggtgacagcatcgcccagggctgactggcactgggagctgtgggcttcactccctcttcctgggtgcacgcttgtgctccaaagccaacctctccctgcctctctagggagctgcagtccatggctgaccaggagcaggtgtcaccagccgccatcaagaagaccatcctggacaaggtgaagctggactcccctgcagggaccgctctgtcaccttctggccacaccaagctgctcccccgcagcctggccccagcgggcaaggattgacacgtcctgcctgaccaccatcctgccaccaccttctcttctcttgtcactagggggactagggggtccccaaagtggcccactttctgtggctctgatcagcgcaggggccagccagggacatagccagggaggggccacatcacttcccactggaaatctctgtggtctgcaagtgcttcccagcccagaacaggggtggattccccaacctcaacctcctttcttctctgctcccaaaccatgtcaggaccaccttcctctagagctcgggagcccggagggtcttcacccactcctactccagtatcagctggcacgggctccttcctgagagcaaaggtcaaggaccccctctgtgaaggctcagcagaggtgggatcccacgccccctcccggcccctccctgccctccattcagggagaaacctctccttcccgtgtgagaagggccagagggtccaggcatcccaagtccagcgtgaagggccacagcccctcttggctgccaagcacgcagatcccatggacatttggggaaagggctccttgggctgctggtgaacttctgtggccaccacctcctgctcctgacctccctgggagggtgctatcagttctgtcctggccctttcagttttataagttggtttccagcccccagtgtcctgacttctgtctgccacatgaggagggaggccctgcctgtgtgggagggtggttactgtgggtggaatagtggaggccttcaactgattagacaaggcccgcccacatcttggagggcatctgccttactgattaaaatgtcaatgtaatctaatgcaaaa

SEQ ID NO: 13616 - DNA, 1811 bp, Homo sapiens
ggattcgctggcgcgacgggggcggggcctgggtgcgggtgccgcgtggcggccgcagcgctgagggagccggtgccatctgtgggggctttgggccaggggtctccggacagcatgagcgtgggcttcatcggcgctggccagctggcttttgccctggccaagggcttcacagcagcaggcgtcttggctgcccacaagataatggctagctccccagacatggacctggccacagtttctgctctcaggaagatgggggtgaagttgacaccccacaacaaggagacggtgcagcacagtgatgtgctcttcctggctgtgaagccacacatcatccccttcatcctggatgaaataggcgccgacattgaggacagacacattgtggtgtcctgcgcggccggcgtcaccatcagctccattgagaagaagctgtcagcgtttcggccagcccccagggtcatccgctgcatgaccaacactccagtcgtggtgcgggagggggccaccgtgtatgccacaggcacgcacgcccaggtggaggacgggaggctcatggagcagctgctgagcagcgtgggcttctgcacggaggtggaagaggacctgattgatgccgtcacggggctcagtggcagcggccccgcctacggggctgccaagatgctgctgcactcagaacagcacccaggccagctcaaggacaacgtcagctctcctggtggggccaccatccatgccttgcatgtgctggagagtgggggcttccgctccctgctcatcaacgctgtggaggcctcctgcatccgcacacgggagctgcagtccatggctgaccaggagcaggtgtcaccagccgccatcaagaagaccatcctggacaaggtgaagctggactcccctgcagggaccgctctgtcaccttctggccacaccaagctgctcccccgcagcctggccccagcgggcaaggattgacacgtcctgcctgaccaccatcctgccaccaccttctcttctcttgtcactagggggactagggggtccccaaagtggcccactttctgtggctctgatcagcgcaggggccagccagggacatagccagggaggggccacatcacttcccactggaaatctctgtggtctgcaagtgcttcccagcccagaacaggggtggattccccaacctcaacctcctttcttctctgctcccaaaccatgtcaggaccaccttcctctagagctcgggagcccggagggtcttcacccactcctactccagtatcagctggcacgggctccttcctgagagcaaaggtcaaggaccccctctgtgaaggctcagcagaggtgggatcccacgccccctcccggcccctccctgccctccattcagggagaaacctctccttcccgtgtgagaagggccagagggtccaggcatcccaagtccagcgtgaagggccacagcccctcttggctgccaagcacgcagatcccatggacatttggggaaagggctccttgggctgctggtgaacttctgtggccaccacctcctgctcctgacctccctgggagggtgctatcagttctgtcctggccctttcagttttataagttggtttccagcccccagtgtcctgacttctgtctgccacatgaggagggaggccctgcctgtgtgggagggtggttactgtgggtggaatagtggaggccttcaactgattagacaaggcccgcccacatcttggagggcatctgccttactgattaaaatgtcaatgtaatctaatgcaaaa

SEQ ID NO: 13617 - DNA, 2933 bp, Homo sapiens
gtgcgggtgccgcgtggcggccgcagcgctgaggggtgggtacgacccgcgcacggtagctgggttggggtcgggctccgggaatggtgggcggcggtcgccgggtggggcgcgacggtagcccagttctgggcggggtgggaacccagacgggggacccctaggcgccgggccctccctctccccgtacttttcccccttcccagtcatttcttctgcggaacctccacccctccagtgggtgcgggaccctaggcagcaggccaggcaccgccgctctgactgggggccccgaagcagttaacgggccggacagcaaagtggaaagttagaccagctgggaccaggggaggtgggcacccggctgcgggaggagcggccaggctggcactgcccccctaacttgctctcgatcctgccggtctcgtcccgcagagccggtgccatctgtgggggctttgggccaggggtctccggacagcatgagcgtgggcttcatcggcgctggccagctggcttttgccctggccaagggcttcacagcagcaggtaggcccccaggtgggggacggtgaggcccagtgggagagactggcctctttccacttctgcagggctgggggctgaaggtgggtgctgggtcacaaggcctgagtcctgcgggaactggcaacttctgtgtgtttggggctttacctgtgctgtctcactcttcttcctgggaatggggagggagggaagccaaagctagccatgaagaggaactgtttccggccgggcgcggtggctcacgcctgtaatcccagcactttgggaggccgaggcgggcggatcacgaggtcaggagatcgagaccatcctggctaacacagtgaaaccccgtctctactaaaaataccaaaaattagccgggtgtggtggcgggcgcctgtagtcccagctactcgggaggctgaggcaggagcatggcgtgaacccgggaggtggagcttgcagtgagccgagattgcgccactgcactccagcctgggcaacacagcgagactccgtctcaaaaaaaaaaaaataataaagaactgaagaggaactgtttctcccctcaggcgtcttggctgcccacaagataatggctagctccccagacatggacctggccacagtttctgctctcagggtaggtgcagatgaaagggagaaaggagactgagtccctgtggggctgggtgtgagaggcaggagtgtgtgctgtagcccccaccccagtgagggcaggggccctgggctggggtctcatggaccccacctcctcgccctgctgattgctcttgggacctgggtggtgggcgtgtgtacagctgataggagggtgttgttctggaatggagttccctgcacagggttaaagtttcgaggggtcctctgggggcctggcaggtggggccacagcctggcagccaaggaacacacctgggggctgcttgagaccaccactcccacgtggagagcccggtctggaggacggcagtcccaggctgggggcagattggtggcatggatggagggtccttttctgtctgcagcagggacatattccacacagagttcttcctccatttctgggtgggaagggtcatcaagggggtggtcagagccctgagcccccagccctgcccacccccaactccagcattctctgtgccattctacctgtggggctcttggcttggtgggggtacagacagccacgggaccaggctgagcccacctgttgcccctgcagaagatgggggtgaagttgacaccccacaacaaggagacggtgcagcacagtgatgtgctcttcctggctgtgaagccacacatcatccccttcatcctggatgaaataggcgccgacattgaggacagacacattgtggtgtcctgcgcggccggcgtcaccatcagctccattgagaaggtagcaccgcaggcccagtggggtgtggagaggggctgtctagagcccgggccctcagtacttcagttttcatctgcaaaagggttgcagcgtcccggcccactgggagagctcgggcactgcttggtggggtgagtgcatctaggcactgcgtccatggccagacggacacgctggtttctcttccagaagctgtcagcgtttcggccagcccccagggtcatccgctgcatgaccaacactccagtcgtggtgcgggagggggccaccgtgtatgccacaggcacgcacgcccaggtggaggacgggaggctcatggagcagctgctgagcagcgtgggcttctgcacggaggtggaagaggacctgattgatgccgtcacggggctcagtggcagcggccccgcctacgtaaggactgcgggggaagctggcggcggcgggcacttcccgggaccaccgggcacatctgtccctgctccccctgggagggccagggtggagggctccaaggctgtgggaactggagcttgcccagaagggaaggaggagaagcccaggagagaggctcagggtgccttctccccacaggcattcacagccctggatgccctggctgatgggggtgtgaagatgggacttccaaggcgcctggcagtccgcctcggggcccaggccctcctggtcagtgtgtttcctgaccctctggtggggccactctttgcggggccctggggcttcactgggaggagccaagtggggcgtcagtgtgtgctacagtggctggggcagtgccccgcagaggcaggtgcgtgcccacagccgtcagcctttcttctggctgcagggggctgccaagatgctgctgcactcagaacagcacccaggccagctcaaggacaacgtcagctctcctggtggggccaccatccatgccttgcatgtgctggagagtgggggcttccgctccctg

SEQ ID NO: 13618 - DNA, 841 bp, Homo sapiens
gtgcgggtgccgcgtggcggccgcagcgctgagggagccggtgccatctgtgggggctttgggccaggggtctccggacagcatgagcgtgggcttcatcggcgctggccagctggcttttgccctggccaagggcttcacagcagcaggcgtcttggctgcccacaagataatggctagctccccagacatggacctggccacagtttctgctctcaggaagatgggggtgaagttgacaccccacaacaaggagacggtgcagcacagtgatgtgctcttcctggctgtgaagccacacatcatccccttcatcctggatgaaataggcgccgacattgaggacagacacattgtggtgtcctgcgcggccggcgtcaccatcagctccattgagaagaagctgtcagcgtttcggccagcccccagggtcatccgctgcatgaccaacactccagtcgtggtgcgggagggggccaccgtgtatgccacaggcacgcacgcccaggtggaggacgggaggctcatggagcagctgctgagcagcgtgggcttctgcacggaggtggaagaggacctgattgatgccgtcacggggctcagtggcagcggccccgcctacgcattcacagccctggatgccctggctgatgggggtgtgaagatgggacttccaaggcgcctggcagtccgcctcggggcccaggccctcctgggggctgccaagatgctgctgcactcagaacagcacccaggccagctcaaggacaacgtcagctctcctggtggggccaccatccatgccttgcatgtgctggagagtgggggcttccgctccctg

SEQ ID NO: 13619 - DNA, 2622 bp, Homo sapiens
gattcgctggcgcgacgggggcggggcctgggtgcgggtgccgcgtggcggccgcagcgctgaggggtgggtacgacccgcgcacggtagctgggttggggtcgggctccgggaatggtgggcggcggtcgccgggtggggcgcgacggtagcccagttctgggcggggtgggaacccagacgggggacccctaggcgccgggccctccctctccccgtacttttcccccttcccagtcatttcttctgcggaacctccacccctccagtgggtgcgggaccctaggcagcaggccaggcaccgccgctctgactgggggccccgaagcagttaacgggccggacagcaaagtggaaagttagaccagctgggaccaggggaggtgggcacccggctgcgggaggagcggccaggctggcactgcccccctaacttgctctcgatcctgccggtctcgtcccgcagagccggtgccatctgtgggggctttgggccaggggtctccggacagcatgagcgtgggcttcatcggcgctggccagctggcttttgccctggccaagggcttcacagcagcaggtaggcccccaggtgggggacggtgaggcccagtgggagagactggcctctttccacttctgcagggctgggggctgaaggtgggtgctgggtcacaaggcctgagtcctgcgggaactggcaacttctgtgtgtttggggctttacctgtgctgtctcactcttcttcctgggaatggggagggagggaagccaaagctagccatgaagaggaactgtttccggccgggcgcggtggctcacgcctgtaatcccagcactttgggaggccgaggcgggcggatcacgaggtcaggagatcgagaccatcctggctaacacagtgaaaccccgtctctactaaaaataccaaaaattagccgggtgtggtggcgggcgcctgtagtcccagctactcgggaggctgaggcaggagcatggcgtgaacccgggaggtggagcttgcagtgagccgagattgcgccactgcactccagcctgggcaacacagcgagactccgtctcaaaaaaaaaaaaataataaagaactgaagaggaactgtttctcccctcaggcgtcttggctgcccacaagataatggctagctccccagacatggacctggccacagtttctgctctcagggtaggtgcagatgaaagggagaaaggagactgagtccctgtggggctgggtgtgagaggcaggagtgtgtgctgtagcccccaccccagtgagggcaggggccctgggctggggtctcatggaccccacctcctcgccctgctgattgctcttgggacctgggtggtgggcgtgtgtacagctgataggagggtgttgttctggaatggagttccctgcacagggttaaagtttcgaggggtcctctgggggcctggcaggtggggccacagcctggcagccaaggaacacacctgggggctgcttgagaccaccactcccacgtggagagcccggtctggaggacggcagtcccaggctgggggcagattggtggcatggatggagggtccttttctgtctgcagcagggacatattccacacagagttcttcctccatttctgggtgggaagggtcatcaagggggtggtcagagccctgagcccccagccctgcccacccccaactccagcattctctgtgccattctacctgtggggctcttggcttggtgggggtacagacagccacgggaccaggctgagcccacctgttgcccctgcagaagatgggggtgaagttgacaccccacaacaaggagacggtgcagcacagtgatgtgctcttcctggctgtgaagccacacatcatccccttcatcctggatgaaataggcgccgacattgaggacagacacattgtggtgtcctgcgcggccggcgtcaccatcagctccattgagaaggtagcaccgcaggcccagtggggtgtggagaggggctgtctagagcccgggccctcagtacttcagttttcatctgcaaaagggttgcagcgtcccggcccactgggagagctcgggcactgcttggtggggtgagtgcatctaggcactgcgtccatggccagacggacacgctggtttctcttccagaagctgtcagcgtttcggccagcccccagggtcatccgctgcatgaccaacactccagtcgtggtgcgggagggggccaccgtgtatgccacaggcacgcacgcccaggtggaggacgggaggctcatggagcagctgctgagcagcgtgggcttctgcacggaggtggaagaggacctgattgatgccgtcacggggctcagtggcagcggccccgcctacgtaaggactgcgggggaagctggcggcggcgggcacttcccgggaccaccgggcacatctgtccctgctccccctgggagggccagggtggagggctccaaggctgtgggaactggagcttgcccagaagggaaggaggagaagcccaggagagaggctcagggtgccttctccccacaggcattcacagccctggatgccctggctgatgggggtgtga

SEQ ID NO: 13620 - DNA, 510 bp, Homo sapiens
gattcgctggcgcgacgggggcggggcctgggtgcgggtgccgcgtggcggccgcagcgctgagggagccggtgccatctgtgggggctttgggccaggggtctccggacagcatgagcgtgggcttcatcggcgctggccagctggcttttgccctggccaagggcttcacagcagcaggcgtcttggctgcccacaagataatggctagctccccagacatggacctggccacagtttctgctctcaggctgtcagcgtttcggccagcccccagggtcatccgctgcatgaccaacactccagtcgtggtgcgggagggggccaccgtgtatgccacaggcacgcacgcccaggtggaggacgggaggctcatggagcagctgctgagcagcgtgggcttctgcacggaggtggaagaggacctgattgatgccgtcacggggctcagtggcagcggccccgcctacgcattcacagccctggatgccctggctgatgggggtgtga

SEQ ID NO: 13621 - DNA, 3949 bp, Homo sapiens
tcccgcagagccggtgccatctgtgggggctttgggccaggggtctccggacagcatgagcgtgggcttcatcggcgctggccagctggcttttgccctggccaagggcttcacagcagcaggtaggcccccaggtgggggacggtgaggcccagtgggagagactggcctctttccacttctgcagggctgggggctgaaggtgggtgctgggtcacaaggcctgagtcctgcgggaactggcaacttctgtgtgtttggggctttacctgtgctgtctcactcttcttcctgggaatggggagggagggaagccaaagctagccatgaagaggaactgtttccggccgggcgcggtggctcacgcctgtaatcccagcactttgggaggccgaggcgggcggatcacgaggtcaggagatcgagaccatcctggctaacacagtgaaaccccgtctctactaaaaataccaaaaattagccgggtgtggtggcgggcgcctgtagtcccagctactcgggaggctgaggcaggagcatggcgtgaacccgggaggtggagcttgcagtgagccgagattgcgccactgcactccagcctgggcaacacagcgagactccgtctcaaaaaaaaaaaaataataaagaactgaagaggaactgtttctcccctcaggcgtcttggctgcccacaagataatggctagctccccagacatggacctggccacagtttctgctctcagggtaggtgcagatgaaagggagaaaggagactgagtccctgtggggctgggtgtgagaggcaggagtgtgtgctgtagcccccaccccagtgagggcaggggccctgggctggggtctcatggaccccacctcctcgccctgctgattgctcttgggacctgggtggtgggcgtgtgtacagctgataggagggtgttgttctggaatggagttccctgcacagggttaaagtttcgaggggtcctctgggggcctggcaggtggggccacagcctggcagccaaggaacacacctgggggctgcttgagaccaccactcccacgtggagagcccggtctggaggacggcagtcccaggctgggggcagattggtggcatggatggagggtccttttctgtctgcagcagggacatattccacacagagttcttcctccatttctgggtgggaagggtcatcaagggggtggtcagagccctgagcccccagccctgcccacccccaactccagcattctctgtgccattctacctgtggggctcttggcttggtgggggtacagacagccacgggaccaggctgagcccacctgttgcccctgcagaagatgggggtgaagttgacaccccacaacaaggagacggtgcagcacagtgatgtgctcttcctggctgtgaagccacacatcatccccttcatcctggatgaaataggcgccgacattgaggacagacacattgtggtgtcctgcgcggccggcgtcaccatcagctccattgagaaggtagcaccgcaggcccagtggggtgtggagaggggctgtctagagcccgggccctcagtacttcagttttcatctgcaaaagggttgcagcgtcccggcccactgggagagctcgggcactgcttggtggggtgagtgcatctaggcactgcgtccatggccagacggacacgctggtttctcttccagaagctgtcagcgtttcggccagcccccagggtcatccgctgcatgaccaacactccagtcgtggtgcgggagggggccaccgtgtatgccacaggcacgcacgcccaggtggaggacgggaggctcatggagcagctgctgagcagcgtgggcttctgcacggaggtggaagaggacctgattgatgccgtcacggggctcagtggcagcggccccgcctacgtaaggactgcgggggaagctggcggcggcgggcacttcccgggaccaccgggcacatctgtccctgctccccctgggagggccagggtggagggctccaaggctgtgggaactggagcttgcccagaagggaaggaggagaagcccaggagagaggctcagggtgccttctccccacaggcattcacagccctggatgccctggctgatgggggtgtgaagatgggacttccaaggcgcctggcagtccgcctcggggcccaggccctcctggtcagtgtgtttcctgaccctctggtggggccactctttgcggggccctggggcttcactgggaggagccaagtggggcgtcagtgtgtgctacagtggctggggcagtgccccgcagaggcaggtgcgtgcccacagccgtcagcctttcttctggctgcagggggctgccaagatgctgctgcactcagaacagcacccaggccagctcaaggacaacgtcagctctcctggtggggccaccatccatgccttgcatgtgctggagagtgggggcttccgctccctgctcatcaacgctgtggaggcctcctgcatccgcacacggtgggcccccgcgctgcccgcttccctggtctccagtccttgcatggcagaggcctctctcacacacatctgctcattcacgcactcagcagatacgtattgagctccagcccagtgttgcgcaggacacagggggccccgaggttccctgggttactgtgggcagtgcccctccccaccttccgtttcctgcgaggagggaacatccatagagggacccggatgctgtgccctgtgctccccacataggttcaccattgtcatagctaggagtgtcatttgagccaggggccacaccagtggggtggcggggtggccagccacattaggaaacttctgtgggggcccaccttcctcctgccctcgctgtgggattaagttagaccagtaggacacgcagcaacatccaggcacaaggaaaattccatggaaggtgaaagaagcaaagagcaagagaaagacagagtttgctgtttgcctgggatcccacagctggtcaaaggcagagccaggctgggagccgctgtccccagttcaggtctgcagggtgggtgaggacgtctttctcgccacactgcccactctccagtccagacaccctcagactctgcgagtgccaccctgtaacagtgaggggaacacgaggggcctggcctcacctccagcctgcaggggagacaggtgtaaacccacatcccgtggtggggccacgagaactcaggtctggggggcactgcggggagatttggtgatgctgagctgattcgaatgaggtgagaaggagcccagcagctgtgtgggggcgtgtcgctggcagaggggaataaaggtgctgaggtgagggtgacagcatcgcccagggctgactggcactgggagctgtgggcttcactccctcttcctgggtgcacgcttgtgctccaaagccaacctctccctgcctctctagggagctgcagtccatggctgaccaggagcaggtgtcaccagccgccatcaagaagaccatcctggacaaggtgaagctggactcccctgcagggaccgctctgtcaccttctggccacaccaagctgctcccccgcagcctggccccagcgggcaaggattgacacgtcctgcctgaccaccatcctgccaccaccttctcttctcttgtcactagggggactagggggtccccaaagtggcccactttctgtggctctgatcagcgcaggggccagccagggacatagccagggaggggccacatcacttcccactggaaatctctgtggtctgcaagtgcttcccagcccagaacaggggtggattccccaacctcaacctcctttcttctctgctcccaaaccatgtcaggaccaccttcctctagagctcgggagcccggagggtcttcacc

SEQ ID NO: 13622 - DNA, 1144 bp, Homo sapiens
tcccgcagagccggtgccatctgtgggggctttgggccaggggtctccggacagcatgagcgtgggcttcatcggcgctggccagctggcttttgccctggccaagggcttcacagcagcaggcgtcttggctgcccacaagataatggctagctccccagacatggacctggccacagtttctgctctcaggaagatgggggtgaagttgacaccccacaacaaggagacggtgcagcacagtgatgtgctcttcctggctgtgaagccacacatcatccccttcatcctggatgaaataggcgccgacattgaggacagacacattgtggtgtcctgcgcggccggcgtcaccatcagctccattgagaagaagctgtcagcgtttcggccagcccccagggtcatccgctgcatgaccaacactccagtcgtggtgcgggagggggccaccgtgtatgccacaggcacgcacgcccaggtggaggacgggaggctcatggagcagctgctgagcagcgtgggcttctgcacggaggtggaagaggacctgattgatgccgtcacggggctcagtggcagcggccccgcctacgcattcacagccctggatgccctggctgatgggggtgtgaagatgggacttccaaggcgcctggcagtccgcctcggggcccaggccctcctgggagctgcagtccatggctgaccaggagcaggtgtcaccagccgccatcaagaagaccatcctggacaaggtgaagctggactcccctgcagggaccgctctgtcaccttctggccacaccaagctgctcccccgcagcctggccccagcgggcaaggattgacacgtcctgcctgaccaccatcctgccaccaccttctcttctcttgtcactagggggactagggggtccccaaagtggcccactttctgtggctctgatcagcgcaggggccagccagggacatagccagggaggggccacatcacttcccactggaaatctctgtggtctgcaagtgcttcccagcccagaacaggggtggattccccaacctcaacctcctttcttctctgctcccaaaccatgtcaggaccaccttcctctagagctcgggagcccggagggtcttcacc

SEQ ID NO: 13623 - DNA, 6032 bp, Homo sapiens
gggcctgggctgcccctttgaccggctggtggtggtgtacaccttcctggctgtgctcctgtacctcagcgccgccgtgatctggccagtcttctgtttcgatcccaagtacggtgagcccaaacggccccccaactgtgctcggggcagctgtccctgggacagccagctggtggtggccatcttcacctacgtcaacctgctcctgtacgtcgttgacctcgcctactcccagaggattcgcttcgtgcccagcctgtagcccacagtggcagcccacccacctctgctctctggccaccagctccaggctctgcgagggaaactcaggtgaaccaaagtgtcaagtagcgagcaggagggaagccgcgggctcaggggagatgaagtacaacgggagaggtcactccccgacttccagactgggctcagagggacaagggcaggacagtagggcagaggccctgagcagacgcaggggagagcctcacctaggccaatccccaactcactctctctcaccatttcccagcgctcctggggctcagtgctggtcactggaacatcataagggaaaactttaaagcagctgctgttgtgacccattttgcagctggggacatggaggctagaagcatttgcgaggcacccagtacctccattagtgtctggagaccacagtcaggctgggtaaggcaagctgaaagaggaatgacttccagaggagacgaacccaggagagtagctgggccaggcaaggggagggaggggcgtggggagccggaaccactcctggttcagagaggcagctcccagaaccctgggaagagagccctgcctggggagctgtgccagctcacagagaaggagccagaaatctggaccagcctctcccacccacgtccgggaagcctctgggctggtagccacagtgtttggaagcaggcttcctccggagtctccgcaggctggaggtggcgcgggtggcctggaagagcctgcagagcccggcggcaccgagtgcacagtggacggggaggacctggttccgccatagccacggagccccacctggacactcaccattggctgtgacgaagcagcttcagcagtgcccggcgggcatctgtgcactgtgggcatctgtggcactgggagggagcccggctgagggcggccgctggacacagaatctgggtactgcttgcctctgctcaagggtccagttgccgaaactcctgacgccggggccatcatcctccaggctccagccagcttctcctgcacagaagcccagcctggtccagccaggagctgacccactggccacccctgagtccaagccgggtgggcagtggcacaacagcccctcagcccattgactgggccccattgacgtccttgagcaggaaataaatgctgacatttatacgtaccctgcctctggaccagcagtctcttctgaggggactgtgggcacttgcccctcctggcggcccctcctagcgtgctctgggggaaggctgaggaaggaagtggcctgggatcacagtcagggcaggctgggctcctgagggtctgagcagcctcctggggaaggggcaggcagcgtcttctgcctcacaggggtgacaggccagcctggctccgacgggcctgtggctcatgcccgtccctcccagaggcccgcagcactcacctcctcccccacgcccatctgggggtctcgagaggccctggacacagcgatggacagacgcactgttgctccttttagacggcggtccccacagccaggcctgtgctgctgccatgaagaatgtgaggaaggggcctcactggccgctgaggaggggtctcgctcacgttagccaacaaacagggtccggccgacatcctttactcagagggggtgggtgttttggggtcaatggcagatcccagatgagggcagtcagctgttcagggcctgccgctggctgagggcgatacagagggggcatagggatcacctgcttcctgactcaggggagacctgggcaccagtcttggagaggacccagcctccttctctcctttttttcatgtggccagaattctgaaacgagttaattgtcaccaacttcccaatttcctccctgtccggtggtcctctgccaccttcgcaaaggtcctgagggacagaaaggaaggggaggggacccagggctgggagacttccttcagagtcagtccttttgacagtgtatccctggcccagagggctgtccattttgggtttttgggtttttaggtaaaagtgttacttgctgttatcacttggggaaaagtgattttgtaacagcctggggagcttggctctcaaagcgcctaggcgatgctagcctccgtgccccaggtttgagctgtccatctggacaagctcttcccatggccaccacagagcagcctcccagtgttggtggtggtcattacgtgttcacggtggggggaccaggtagacagatagccagaacgcgtggccctgccgctgtggcagaagcatcccaggccttctgaaatgatgtgctagaatagcctgtcatcatctaagatacagcacagaaaaaataaggcagctcctctcaccccttggcaggggaatgggctgccagtgatcccttctgacttcgcccttaatcttggccaccgacagggaccctgactatccagagccccagatgcaggcccgaatcagatgaactctgagcatgtcctcagggggaagtgactggagcttcactccccctaaaacccaggcaggcgagaggtttgggtattggaggatgctccgggctgcgtgggagtgggggcatgatggggtgggcttccttcgtttgcttagtggagcaccgctgcgtgcccagttagaggaacacctgtggccgcactgtcatgcctctttcttttcttttcttcttttcttcctttctttctctctctctttttttcagatggagtctcgctcttgttgcccaggctggagtgcagtggcgcaatcccggctcactgcaacctccacctccagggttcaagcgattctcctgcctcagcttctcgagtagctggaattacaggcacctgtcaccacgcccggttaattttttgtatttttagtagagacgggggtttcaccatgttggtcaggctggtctcgaactcctgacctcaggtgatccgcccgcctcggcctcccaaagtgctgggattacaggcgtgagccaccgcgcccggcccaaatggtgatatatttaaaatgcttccacttggcaaattattttcaactctgcccccaagggaaaaaaaaaaaggaaagaaaacgctgtacagccgggcttctccaaactcgatgacagtagaagggactgattcccagagagagccggccgcgcgcccagggacgccagctggacgcgtccgtgtccgggtggcccaagacaaagccctgcgtggagggcccctcacaggccccaatcgggccgccccctccgcccgcgtcctcggaccccacgtgtaggtcccgggaagcgcgaccaggaggagcgcgggtcaggggaccgcgtgccggagagggtgtctatccgggggccgggggatcccggggcgcgagagaggcgagggccggcggtcggcgtgggaggggcgcgcagatgatgcaaccgctctggcgccgccgcgcgctctgattggccagcgcctggcggccgcgcccggattcgctggcgcgacgggggcggggcctgggtgcgggtgccgcgtggcggccgcagcgctgaggggtgggtacgacccgcgcacggtagctgggttggggtcgggctccgggaatggtgggcggcggtcgccgggtggggcgcgacggtagcccagttctgggcggggtgggaacccagacgggggacccctaggcgccgggccctccctctccccgtacttttcccccttcccagtcatttcttctgcggaacctccacccctccagtgggtgcgggaccctaggcagcaggccaggcaccgccgctctgactgggggccccgaagcagttaacgggccggacagcaaagtggaaagttagaccagctgggaccaggggaggtgggcacccggctgcgggaggagcggccaggctggcactgcccccctaacttgctctcgatcctgccggtctcgtcccgcagagccggtgccatctgtgggggctttgggccaggggtctccggacagcatgagcgtgggcttcatcggcgctggccagctggcttttgccctggccaagggcttcacagcagcaggtaggcccccaggtgggggacggtgaggcccagtgggagagactggcctctttccacttctgcagggctgggggctgaaggtgggtgctgggtcacaaggcctgagtcctgcgggaactggcaacttctgtgtgtttggggctttacctgtgctgtctcactcttcttcctgggaatggggagggagggaagccaaagctagccatgaagaggaactgtttccggccgggcgcggtggctcacgcctgtaatcccagcactttgggaggccgaggcgggcggatcacgaggtcaggagatcgagaccatcctggctaacacagtgaaaccccgtctctactaaaaataccaaaaattagccgggtgtggtggcgggcgcctgtagtcccagctactcgggaggctgaggcaggagcatggcgtgaacccgggaggtggagcttgcagtgagccgagattgcgccactgcactccagcctgggcaacacagcgagactccgtctcaaaaaaaaaaaaataataaagaactgaagaggaactgtttctcccctcaggcgtcttggctgcccacaagataatggctagctccccagacatggacctggccacagtttctgctctcagggtaggtgcagatgaaagggagaaaggagactgagtccctgtggggctgggtgtgagaggcaggagtgtgtgctgtagcccccaccccagtgagggcaggggccctgggctggggtctcatggaccccacctcctcgccctgctgattgctcttgggacctgggtggtgggcgtgtgtacagctgataggagggtgttgttctggaatggagttccctgcacagggttaaagtttcgaggggtcctctgggggcctggcaggtggggccacagcctggcagccaaggaacacacctgggggctgcttgagaccaccactcccacgtggagagcccggtctggaggacggcagtcccaggctgggggcagattggtggcatggatggagggtccttttctgtctgcagcagggacatattccacacagagttcttcctccatttctgggtgggaagggtcatcaagggggtggtcagagccctgagcccccagccctgcccacccccaactccagcattctctgtgccattctacctgtggggctcttggcttggtgggggtacagacagccacgggaccaggctgagcccacctgttgcccctgcagaagatgggggtgaagttgacaccccacaacaaggagacggtgcagcacagtgatgtgctcttcctggctgtgaagccacacatcatccccttcatcctggatgaaataggcgccgacattgaggacagacacattgtggtgtcctgcgcggccggcgtcaccatcagctccattgagaaggtagcaccgcaggcccagtggggtgtggagaggggctgtctagagcccgggccctcagtacttcagttttcatctgcaaaagggttgcagcgtcccggcccactgggagagctcgggcactgcttggtggggtgagtgcatctaggcactgcgtccatggccagacggacacgctggtttctcttccagaagctgtcagcgtttcggccagcccccagggtcatccgctgcatgaccaacactccagtcgtggtgcgggagggggccaccgtgtatgccacaggcacgc

SEQ ID NO: 13624 - DNA, 681 bp, Homo sapiens
gggcctgggctgcccctttgaccggctggtggtggtgtacaccttcctggctgtgctcctgtacctcagcgccgccgtgatctggccagtcttctgtttcgatcccaagtacggtgagcccaaacggccccccaactgtgctcggggcagctgtccctgggacagccagctggtggtggccatcttcacctacgtcaacctgctcctgtacgtcgttgacctcgcctactcccagaggattcgcttcgtgcccagcctgtagcccacagtggcagcccacccacctctgctctctggccaccagctccaggctctgcgagggaaactcaggcgtcttggctgcccacaagataatggctagctccccagacatggacctggccacagtttctgctctcaggaagatgggggtgaagttgacaccccacaacaaggagacggtgcagcacagtgatgtgctcttcctggctgtgaagccacacatcatccccttcatcctggatgaaataggcgccgacattgaggacagacacattgtggtgtcctgcgcggccggcgtcaccatcagctccattgagaagaagctgtcagcgtttcggccagcccccagggtcatccgctgcatgaccaacactccagtcgtggtgcgggagggggccaccgtgtatgccacaggcacgc

SEQ ID NO: 13625 - DNA, 2287 bp, Homo sapiens
gtacgacccgcgcacggtagctgggttggggtcgggctccgggaatggtgggcggcggtcgccgggtggggcgcgacggtagcccagttctgggcggggtgggaacccagacgggggacccctaggcgccgggccctccctctccccgtacttttcccccttcccagtcatttcttctgcggaacctccacccctccagtgggtgcgggaccctaggcagcaggccaggcaccgccgctctgactgggggccccgaagcagttaacgggccggacagcaaagtggaaagttagaccagctgggaccaggggaggtgggcacccggctgcgggaggagcggccaggctggcactgcccccctaacttgctctcgatcctgccggtctcgtcccgcagagccggtgccatctgtgggggctttgggccaggggtctccggacagcatgagcgtgggcttcatcggcgctggccagctggcttttgccctggccaagggcttcacagcagcaggtaggcccccaggtgggggacggtgaggcccagtgggagagactggcctctttccacttctgcagggctgggggctgaaggtgggtgctgggtcacaaggcctgagtcctgcgggaactggcaacttctgtgtgtttggggctttacctgtgctgtctcactcttcttcctgggaatggggagggagggaagccaaagctagccatgaagaggaactgtttccggccgggcgcggtggctcacgcctgtaatcccagcactttgggaggccgaggcgggcggatcacgaggtcaggagatcgagaccatcctggctaacacagtgaaaccccgtctctactaaaaataccaaaaattagccgggtgtggtggcgggcgcctgtagtcccagctactcgggaggctgaggcaggagcatggcgtgaacccgggaggtggagcttgcagtgagccgagattgcgccactgcactccagcctgggcaacacagcgagactccgtctcaaaaaaaaaaaaataataaagaactgaagaggaactgtttctcccctcaggcgtcttggctgcccacaagataatggctagctccccagacatggacctggccacagtttctgctctcagggtaggtgcagatgaaagggagaaaggagactgagtccctgtggggctgggtgtgagaggcaggagtgtgtgctgtagcccccaccccagtgagggcaggggccctgggctggggtctcatggaccccacctcctcgccctgctgattgctcttgggacctgggtggtgggcgtgtgtacagctgataggagggtgttgttctggaatggagttccctgcacagggttaaagtttcgaggggtcctctgggggcctggcaggtggggccacagcctggcagccaaggaacacacctgggggctgcttgagaccaccactcccacgtggagagcccggtctggaggacggcagtcccaggctgggggcagattggtggcatggatggagggtccttttctgtctgcagcagggacatattccacacagagttcttcctccatttctgggtgggaagggtcatcaagggggtggtcagagccctgagcccccagccctgcccacccccaactccagcattctctgtgccattctacctgtggggctcttggcttggtgggggtacagacagccacgggaccaggctgagcccacctgttgcccctgcagaagatgggggtgaagttgacaccccacaacaaggagacggtgcagcacagtgatgtgctcttcctggctgtgaagccacacatcatccccttcatcctggatgaaataggcgccgacattgaggacagacacattgtggtgtcctgcgcggccggcgtcaccatcagctccattgagaaggtagcaccgcaggcccagtggggtgtggagaggggctgtctagagcccgggccctcagtacttcagttttcatctgcaaaagggttgcagcgtcccggcccactgggagagctcgggcactgcttggtggggtgagtgcatctaggcactgcgtccatggccagacggacacgctggtttctcttccagaagctgtcagcgtttcggccagcccccagggtcatccgctgcatgaccaacactccagtcgtggtgcgggagggggccaccgtgtatgccacaggcacgcacgcccaggtggaggacgggaggctcatggagcagctgctgagcagcgtgggcttctgcacggaggtggaagaggac

SEQ ID NO: 13626 - DNA, 572 bp, Homo sapiens
gtacgacccgcgcacggtagctgggttgggagccggtgccatctgtgggggctttgggccaggggtctccggacagcatgagcgtgggcttcatcggcgctggccagctggcttttgccctggccaagggcttcacagcagcaggcgtcttggctgcccacaagataatggctagctccccagacatggacctggccacagtttctgctctcaggaagatgggggtgaagttgacaccccacaacaaggagacggtgcagcacagtgatgtgctcttcctggctgtgaagccacacatcatccccttcatcctggatgaaataggcgccgacattgaggacagacacattgtggtgtcctgcgcggccggcgtcaccatcagctccattgagaagaagctgtcagcgtttcggccagcccccagggtcatccgctgcatgaccaacactccagtcgtggtgcgggagggggccaccgtgtatgccacaggcacgcacgcccaggtggaggacgggaggctcatggagcagctgctgagcagcgtgggcttctgcacggaggtggaagaggac

SEQ ID NO: 13627 - DNA, 2543 bp, Homo sapiens
agagccggccgcgcgcccagggacgccagctggacgcgtccgtgtccgggtggcccaagacaaagccctgcgtggagggcccctcacaggccccaatcgggccgccccctccgcccgcgtcctcggaccccacgtgtaggtcccgggaagcgcgaccaggaggagcgcgggtcaggggaccgcgtgccggagagggtgtctatccgggggccgggggatcccggggcgcgagagaggcgagggccggcggtcggcgtgggaggggcgcgcagatgatgcaaccgctctggcgccgccgcgcgctctgattggccagcgcctggcggccgcgcccggattcgctggcgcgacgggggcggggcctgggtgcgggtgccgcgtggcggccgcagcgctgaggggtgggtacgacccgcgcacggtagctgggttggggtcgggctccgggaatggtgggcggcggtcgccgggtggggcgcgacggtagcccagttctgggcggggtgggaacccagacgggggacccctaggcgccgggccctccctctccccgtacttttcccccttcccagtcatttcttctgcggaacctccacccctccagtgggtgcgggaccctaggcagcaggccaggcaccgccgctctgactgggggccccgaagcagttaacgggccggacagcaaagtggaaagttagaccagctgggaccaggggaggtgggcacccggctgcgggaggagcggccaggctggcactgcccccctaacttgctctcgatcctgccggtctcgtcccgcagagccggtgccatctgtgggggctttgggccaggggtctccggacagcatgagcgtgggcttcatcggcgctggccagctggcttttgccctggccaagggcttcacagcagcaggtaggcccccaggtgggggacggtgaggcccagtgggagagactggcctctttccacttctgcagggctgggggctgaaggtgggtgctgggtcacaaggcctgagtcctgcgggaactggcaacttctgtgtgtttggggctttacctgtgctgtctcactcttcttcctgggaatggggagggagggaagccaaagctagccatgaagaggaactgtttccggccgggcgcggtggctcacgcctgtaatcccagcactttgggaggccgaggcgggcggatcacgaggtcaggagatcgagaccatcctggctaacacagtgaaaccccgtctctactaaaaataccaaaaattagccgggtgtggtggcgggcgcctgtagtcccagctactcgggaggctgaggcaggagcatggcgtgaacccgggaggtggagcttgcagtgagccgagattgcgccactgcactccagcctgggcaacacagcgagactccgtctcaaaaaaaaaaaaataataaagaactgaagaggaactgtttctcccctcaggcgtcttggctgcccacaagataatggctagctccccagacatggacctggccacagtttctgctctcagggtaggtgcagatgaaagggagaaaggagactgagtccctgtggggctgggtgtgagaggcaggagtgtgtgctgtagcccccaccccagtgagggcaggggccctgggctggggtctcatggaccccacctcctcgccctgctgattgctcttgggacctgggtggtgggcgtgtgtacagctgataggagggtgttgttctggaatggagttccctgcacagggttaaagtttcgaggggtcctctgggggcctggcaggtggggccacagcctggcagccaaggaacacacctgggggctgcttgagaccaccactcccacgtggagagcccggtctggaggacggcagtcccaggctgggggcagattggtggcatggatggagggtccttttctgtctgcagcagggacatattccacacagagttcttcctccatttctgggtgggaagggtcatcaagggggtggtcagagccctgagcccccagccctgcccacccccaactccagcattctctgtgccattctacctgtggggctcttggcttggtgggggtacagacagccacgggaccaggctgagcccacctgttgcccctgcagaagatgggggtgaagttgacaccccacaacaaggagacggtgcagcacagtgatgtgctcttcctggctgtgaagccacacatcatccccttcatcctggatgaaataggcgccgacattgaggacagacacattgtggtgtcctgcgcggccggcgtcaccatcagctccattgagaaggtagcaccgcaggcccagtggggtgtggagaggggctgtctagagcccgggccctcagtacttcagttttcatctgcaaaagggttgcagcgtcccggcccactgggagagctcgggcactgcttggtggggtgagtgcatctaggcactgcgtccatggccagacggacacgctggtttctcttccagaagctgtcagcgtttcggccagccccca

SEQ ID NO: 13628 - DNA, 528 bp, Homo sapiens
agagccggccgcgcgcccagggacgccagctggacgcgtccgtgtccgggtggcccaagacaaagccctgcgtggagggcccctcacaggccccaatcgggccgccccctccgcccgcgtcctcggaccccacgtagccggtgccatctgtgggggctttgggccaggggtctccggacagcatgagcgtgggcttcatcggcgctggccagctggcttttgccctggccaagggcttcacagcagcaggcgtcttggctgcccacaagataatggctagctccccagacatggacctggccacagtttctgctctcaggaagatgggggtgaagttgacaccccacaacaaggagacggtgcagcacagtgatgtgctcttcctggctgtgaagccacacatcatccccttcatcctggatgaaataggcgccgacattgaggacagacacattgtggtgtcctgcgcggccggcgtcaccatcagctccattgagaagaagctgtcagcgtttcggccagccccca

SEQ ID NO: 13629 - DNA, 9057 bp, Homo sapiens
ggccacggtctccatgctctgctcctctggccgcagcagaaccctgtgaaccccaggcaatgacagcaggatcctgaagcccatgcaggctctgaaccacgcggccatccagaaggggtgagataaatgttggggaaaccatccccgacccccgcgagccccaggagcccaggctgccgcctcctgcctcctacacccctcccccgcacagctggccctggaggctgctggagctggggttaccccgtggggaccctcatgctctttgctcccctccttctccctccccctcccccacaagcgtgaaaccaactgaccggattgacagatgcaggtgcgcgggaggcggaggtgggggtggtgccagcagccaatgggttaatggtcccggcaggggctccacaggggaccaggggtcagatgtctctctaagatggggacaggcacgcaagctgctattccggggctctgatcacggctgtctatttatagcgctggggggagccgcctcacatagacagcagagaggctgccctgctgcaatgtcaccgtcgtcactgcctctgcaggctgcaggcacctgccactaccgcagaggactgaggggccttggcccagcagggaccccagggccttgggggactgtgtgagctggaaacgtggctggccagatgggcagcaccatggagccccctgggggtgcgtacctgcacctgggcgccgtgacatcccctgtgggcacagcccgcgtgctgcagctggcctttggctgcactaccttcagcctggtggcccaccggggtggctttgcgggcgtccagggcaccttctgcatggccgcctggggcttctgcttcgccgtctctgcgctggtggtggcctgtgagttcacacggctccacggctgcctgcggctctcctggggcaacttcaccgccgccttcgccatgctggccaccctgctatgcgcgacggctgcggtcctgtatccgctgtactttgcccggcgggagtgttcccccgagcccgccggctgtgctgccagggacttccgcctggcagccagtgtcttcgccgggctcctcttcctggcctacgctgtggaggtggccctgacgcgggcccggcccggccaggtgagcagctatatggccacggtgtcggggctcctcaagatcgtccaggccttcgtggcctgcatcatcttcggggcgctggtccatgacagccgctacgggcgctacgtggccacccagtggtgcgtggccgtctacagcctgtgcttcctggccacagtggccgtggtggccctgagtgtgatgggccacacagggggcctgggctgcccctttgaccggctggtggtggtgtacaccttcctggctgtgctcctgtacctcagcgccgccgtgatctggccagtcttctgtttcgatcccaagtacggtgagcccaaacggccccccaactgtgctcggggcagctgtccctgggacagccagctggtggtggccatcttcacctacgtcaacctgctcctgtacgtcgttgacctcgcctactcccagaggattcgcttcgtgcccagcctgtagcccacagtggcagcccacccacctctgctctctggccaccagctccaggctctgcgagggaaactcaggtgaaccaaagtgtcaagtagcgagcaggagggaagccgcgggctcaggggagatgaagtacaacgggagaggtcactccccgacttccagactgggctcagagggacaagggcaggacagtagggcagaggccctgagcagacgcaggggagagcctcacctaggccaatccccaactcactctctctcaccatttcccagcgctcctggggctcagtgctggtcactggaacatcataagggaaaactttaaagcagctgctgttgtgacccattttgcagctggggacatggaggctagaagcatttgcgaggcacccagtacctccattagtgtctggagaccacagtcaggctgggtaaggcaagctgaaagaggaatgacttccagaggagacgaacccaggagagtagctgggccaggcaaggggagggaggggcgtggggagccggaaccactcctggttcagagaggcagctcccagaaccctgggaagagagccctgcctggggagctgtgccagctcacagagaaggagccagaaatctggaccagcctctcccacccacgtccgggaagcctctgggctggtagccacagtgtttggaagcaggcttcctccggagtctccgcaggctggaggtggcgcgggtggcctggaagagcctgcagagcccggcggcaccgagtgcacagtggacggggaggacctggttccgccatagccacggagccccacctggacactcaccattggctgtgacgaagcagcttcagcagtgcccggcgggcatctgtgcactgtgggcatctgtggcactgggagggagcccggctgagggcggccgctggacacagaatctgggtactgcttgcctctgctcaagggtccagttgccgaaactcctgacgccggggccatcatcctccaggctccagccagcttctcctgcacagaagcccagcctggtccagccaggagctgacccactggccacccctgagtccaagccgggtgggcagtggcacaacagcccctcagcccattgactgggccccattgacgtccttgagcaggaaataaatgctgacatttatacgtaccctgcctctggaccagcagtctcttctgaggggactgtgggcacttgcccctcctggcggcccctcctagcgtgctctgggggaaggctgaggaaggaagtggcctgggatcacagtcagggcaggctgggctcctgagggtctgagcagcctcctggggaaggggcaggcagcgtcttctgcctcacaggggtgacaggccagcctggctccgacgggcctgtggctcatgcccgtccctcccagaggcccgcagcactcacctcctcccccacgcccatctgggggtctcgagaggccctggacacagcgatggacagacgcactgttgctccttttagacggcggtccccacagccaggcctgtgctgctgccatgaagaatgtgaggaaggggcctcactggccgctgaggaggggtctcgctcacgttagccaacaaacagggtccggccgacatcctttactcagagggggtgggtgttttggggtcaatggcagatcccagatgagggcagtcagctgttcagggcctgccgctggctgagggcgatacagagggggcatagggatcacctgcttcctgactcaggggagacctgggcaccagtcttggagaggacccagcctccttctctcctttttttcatgtggccagaattctgaaacgagttaattgtcaccaacttcccaatttcctccctgtccggtggtcctctgccaccttcgcaaaggtcctgagggacagaaaggaaggggaggggacccagggctgggagacttccttcagagtcagtccttttgacagtgtatccctggcccagagggctgtccattttgggtttttgggtttttaggtaaaagtgttacttgctgttatcacttggggaaaagtgattttgtaacagcctggggagcttggctctcaaagcgcctaggcgatgctagcctccgtgccccaggtttgagctgtccatctggacaagctcttcccatggccaccacagagcagcctcccagtgttggtggtggtcattacgtgttcacggtggggggaccaggtagacagatagccagaacgcgtggccctgccgctgtggcagaagcatcccaggccttctgaaatgatgtgctagaatagcctgtcatcatctaagatacagcacagaaaaaataaggcagctcctctcaccccttggcaggggaatgggctgccagtgatcccttctgacttcgcccttaatcttggccaccgacagggaccctgactatccagagccccagatgcaggcccgaatcagatgaactctgagcatgtcctcagggggaagtgactggagcttcactccccctaaaacccaggcaggcgagaggtttgggtattggaggatgctccgggctgcgtgggagtgggggcatgatggggtgggcttccttcgtttgcttagtggagcaccgctgcgtgcccagttagaggaacacctgtggccgcactgtcatgcctctttcttttcttttcttcttttcttcctttctttctctctctctttttttcagatggagtctcgctcttgttgcccaggctggagtgcagtggcgcaatcccggctcactgcaacctccacctccagggttcaagcgattctcctgcctcagcttctcgagtagctggaattacaggcacctgtcaccacgcccggttaattttttgtatttttagtagagacgggggtttcaccatgttggtcaggctggtctcgaactcctgacctcaggtgatccgcccgcctcggcctcccaaagtgctgggattacaggcgtgagccaccgcgcccggcccaaatggtgatatatttaaaatgcttccacttggcaaattattttcaactctgcccccaagggaaaaaaaaaaaggaaagaaaacgctgtacagccgggcttctccaaactcgatgacagtagaagggactgattcccagagagagccggccgcgcgcccagggacgccagctggacgcgtccgtgtccgggtggcccaagacaaagccctgcgtggagggcccctcacaggccccaatcgggccgccccctccgcccgcgtcctcggaccccacgtgtaggtcccgggaagcgcgaccaggaggagcgcgggtcaggggaccgcgtgccggagagggtgtctatccgggggccgggggatcccggggcgcgagagaggcgagggccggcggtcggcgtgggaggggcgcgcagatgatgcaaccgctctggcgccgccgcgcgctctgattggccagcgcctggcggccgcgcccggattcgctggcgcgacgggggcggggcctgggtgcgggtgccgcgtggcggccgcagcgctgaggggtgggtacgacccgcgcacggtagctgggttggggtcgggctccgggaatggtgggcggcggtcgccgggtggggcgcgacggtagcccagttctgggcggggtgggaacccagacgggggacccctaggcgccgggccctccctctccccgtacttttcccccttcccagtcatttcttctgcggaacctccacccctccagtgggtgcgggaccctaggcagcaggccaggcaccgccgctctgactgggggccccgaagcagttaacgggccggacagcaaagtggaaagttagaccagctgggaccaggggaggtgggcacccggctgcgggaggagcggccaggctggcactgcccccctaacttgctctcgatcctgccggtctcgtcccgcagagccggtgccatctgtgggggctttgggccaggggtctccggacagcatgagcgtgggcttcatcggcgctggccagctggcttttgccctggccaagggcttcacagcagcaggtaggcccccaggtgggggacggtgaggcccagtgggagagactggcctctttccacttctgcagggctgggggctgaaggtgggtgctgggtcacaaggcctgagtcctgcgggaactggcaacttctgtgtgtttggggctttacctgtgctgtctcactcttcttcctgggaatggggagggagggaagccaaagctagccatgaagaggaactgtttccggccgggcgcggtggctcacgcctgtaatcccagcactttgggaggccgaggcgggcggatcacgaggtcaggagatcgagaccatcctggctaacacagtgaaaccccgtctctactaaaaataccaaaaattagccgggtgtggtggcgggcgcctgtagtcccagctactcgggaggctgaggcaggagcatggcgtgaacccgggaggtggagcttgcagtgagccgagattgcgccactgcactccagcctgggcaacacagcgagactccgtctcaaaaaaaaaaaaataataaagaactgaagaggaactgtttctcccctcaggcgtcttggctgcccacaagataatggctagctccccagacatggacctggccacagtttctgctctcagggtaggtgcagatgaaagggagaaaggagactgagtccctgtggggctgggtgtgagaggcaggagtgtgtgctgtagcccccaccccagtgagggcaggggccctgggctggggtctcatggaccccacctcctcgccctgctgattgctcttgggacctgggtggtgggcgtgtgtacagctgataggagggtgttgttctggaatggagttccctgcacagggttaaagtttcgaggggtcctctgggggcctggcaggtggggccacagcctggcagccaaggaacacacctgggggctgcttgagaccaccactcccacgtggagagcccggtctggaggacggcagtcccaggctgggggcagattggtggcatggatggagggtccttttctgtctgcagcagggacatattccacacagagttcttcctccatttctgggtgggaagggtcatcaagggggtggtcagagccctgagcccccagccctgcccacccccaactccagcattctctgtgccattctacctgtggggctcttggcttggtgggggtacagacagccacgggaccaggctgagcccacctgttgcccctgcagaagatgggggtgaagttgacaccccacaacaaggagacggtgcagcacagtgatgtgctcttcctggctgtgaagccacacatcatccccttcatcctggatgaaataggcgccgacattgaggacagacacattgtggtgtcctgcgcggccggcgtcaccatcagctccattgagaaggtagcaccgcaggcccagtggggtgtggagaggggctgtctagagcccgggccctcagtacttcagttttcatctgcaaaagggttgcagcgtcccggcccactgggagagctcgggcactgcttggtggggtgagtgcatctaggcactgcgtccatggccagacggacacgctggtttctcttccagaagctgtcagcgtttcggccagcccccagggtcatccgctgcatgaccaacactccagtcgtggtgcgggagggggccaccgtgtatgccacaggcacgcacgcccaggtggaggacgggaggctcatggagcagctgctgagcagcgtgggcttctgcacggaggtggaagaggacctgattgatgccgtcacggggctcagtggcagcggccccgcctacgtaaggactgcgggggaagctggcggcggcgggcacttcccgggaccaccgggcacatctgtccctgctccccctgggagggccagggtggagggctccaaggctgtgggaactggagcttgcccagaagggaaggaggagaagcccaggagagaggctcagggtgccttctccccacaggcattcacagccctggatgccctggctgatgggggtgtgaagatgggacttccaaggcgcctggcagtccgcctcggggcccaggccctcctggtcagtgtgtttcctgaccctctggtggggccactctttgcggggccctggggcttcactgggaggagccaagtggggcgtcagtgtgtgctacagtggctggggcagtgccccgcagaggcaggtgcgtgcccacagccgtcagcctttcttctggctgcagggggctgccaagatgctgctgcactcagaacagcacccaggccagctcaaggacaacgtcagctctcctggtggggccaccatccatgccttgcatgtgctggagagtgggggcttccgctccctgctcatcaacgctgtggaggcctcctgcatccgcacacggtgggcccccgcgctgcccgcttccctggtctccagtccttgcatggcagaggcctctctcacacacatctgctcattcacgcactcagcagatacgtattgagctccagcccagtgttgcgcaggacacagggggccccgaggttccctgggttactgtgggcagtgcccctccccaccttccgtttcctgcgaggagggaacatccatagagggacccggatgctgtgccctgtgctccccacataggttcaccattgtcatagctaggagtgtcatttgagccaggggccacaccagtggggtggcggggtggccagccacattaggaaacttctgtgggggcccaccttcctcctgccctcgctgtgggattaagttagaccagtaggacacgcagcaacatccaggcacaaggaaaattccatggaaggtgaaagaagcaaagagcaagagaaagacagagtttgctgtttgcctgggatcccacagctggtcaaaggcagagccaggctgggagccgctgtccccagttcaggtctgcagggtgggtgaggacgtctttctcgccacactgcccactctccagtccagacaccctcagactctgcgagtgccaccctgtaacagtgaggggaacacgaggggcctggcctcacctccagcctgcaggggagacaggtgtaaacccacatcccgtggtggggccacgagaactcaggtctggggggcactgcggggagatttggtgatgctgagctgattcgaatgaggtgagaaggagcccagcagctgtgtgggggcgtgtcgctggcagaggggaataaaggtgctgaggtgagggtgacagcatcgcccagggctgactggcactgggagctgtgggcttcactccctcttcctgggtgcacgcttgtgctccaaagccaacctctccctgcctctctagggagctgcagtccatggctga

SEQ ID NO: 13630 - DNA, 868 bp, Homo sapiens
ggccacggtctccatgctctgctcctctggccgcagcagaaccctgtgaaccccaggcaatgacagcaggatcctgaagcccatgcaggctctgaaccacgcggccatccagaaggggcgtcttggctgcccacaagataatggctagctccccagacatggacctggccacagtttctgctctcaggaagatgggggtgaagttgacaccccacaacaaggagacggtgcagcacagtgatgtgctcttcctggctgtgaagccacacatcatccccttcatcctggatgaaataggcgccgacattgaggacagacacattgtggtgtcctgcgcggccggcgtcaccatcagctccattgagaagaagctgtcagcgtttcggccagcccccagggtcatccgctgcatgaccaacactccagtcgtggtgcgggagggggccaccgtgtatgccacaggcacgcacgcccaggtggaggacgggaggctcatggagcagctgctgagcagcgtgggcttctgcacggaggtggaagaggacctgattgatgccgtcacggggctcagtggcagcggccccgcctacgcattcacagccctggatgccctggctgatgggggtgtgaagatgggacttccaaggcgcctggcagtccgcctcggggcccaggccctcctgggggctgccaagatgctgctgcactcagaacagcacccaggccagctcaaggacaacgtcagctctcctggtggggccaccatccatgccttgcatgtgctggagagtgggggcttccgctccctgctcatcaacgctgtggaggcctcctgcatccgcacacgggagctgcagtccatggctga

SEQ ID NO: 13631 - DNA, 1868 bp, Homo sapiens
agctgggttggggtcgggctccgggaatggtgggcggcggtcgccgggtggggcgcgacggtagcccagttctgggcggggtgggaacccagacgggggacccctaggcgccgggccctccctctccccgtacttttcccccttcccagtcatttcttctgcggaacctccacccctccagtgggtgcgggaccctaggcagcaggccaggcaccgccgctctgactgggggccccgaagcagttaacgggccggacagcaaagtggaaagttagaccagctgggaccaggggaggtgggcacccggctgcgggaggagcggccaggctggcactgcccccctaacttgctctcgatcctgccggtctcgtcccgcagagccggtgccatctgtgggggctttgggccaggggtctccggacagcatgagcgtgggcttcatcggcgctggccagctggcttttgccctggccaagggcttcacagcagcaggtaggcccccaggtgggggacggtgaggcccagtgggagagactggcctctttccacttctgcagggctgggggctgaaggtgggtgctgggtcacaaggcctgagtcctgcgggaactggcaacttctgtgtgtttggggctttacctgtgctgtctcactcttcttcctgggaatggggagggagggaagccaaagctagccatgaagaggaactgtttccggccgggcgcggtggctcacgcctgtaatcccagcactttgggaggccgaggcgggcggatcacgaggtcaggagatcgagaccatcctggctaacacagtgaaaccccgtctctactaaaaataccaaaaattagccgggtgtggtggcgggcgcctgtagtcccagctactcgggaggctgaggcaggagcatggcgtgaacccgggaggtggagcttgcagtgagccgagattgcgccactgcactccagcctgggcaacacagcgagactccgtctcaaaaaaaaaaaaataataaagaactgaagaggaactgtttctcccctcaggcgtcttggctgcccacaagataatggctagctccccagacatggacctggccacagtttctgctctcagggtaggtgcagatgaaagggagaaaggagactgagtccctgtggggctgggtgtgagaggcaggagtgtgtgctgtagcccccaccccagtgagggcaggggccctgggctggggtctcatggaccccacctcctcgccctgctgattgctcttgggacctgggtggtgggcgtgtgtacagctgataggagggtgttgttctggaatggagttccctgcacagggttaaagtttcgaggggtcctctgggggcctggcaggtggggccacagcctggcagccaaggaacacacctgggggctgcttgagaccaccactcccacgtggagagcccggtctggaggacggcagtcccaggctgggggcagattggtggcatggatggagggtccttttctgtctgcagcagggacatattccacacagagttcttcctccatttctgggtgggaagggtcatcaagggggtggtcagagccctgagcccccagccctgcccacccccaactccagcattctctgtgccattctacctgtggggctcttggcttggtgggggtacagacagccacgggaccaggctgagcccacctgttgcccctgcagaagatgggggtgaagttgacaccccacaacaaggagacggtgcagcacagtgatgtgctcttcctggctgtgaagccacacatcatccccttcatcctggatgaaataggcgccgacattgaggacagacacattgtggtgtcct

SEQ ID NO: 13632 - DNA, 377 bp, Homo sapiens
agctgggttggggtcgggctccgggaatggtgggcggcggtcgccggagccggtgccatctgtgggggctttgggccaggggtctccggacagcatgagcgtgggcttcatcggcgctggccagctggcttttgccctggccaagggcttcacagcagcaggcgtcttggctgcccacaagataatggctagctccccagacatggacctggccacagtttctgctctcaggaagatgggggtgaagttgacaccccacaacaaggagacggtgcagcacagtgatgtgctcttcctggctgtgaagccacacatcatccccttcatcctggatgaaataggcgccgacattgaggacagacacattgtggtgtcct

SEQ ID NO: 13633 - DNA, 3847 bp, Homo sapiens
gccctggccaagggcttcacagcagcaggtaggcccccaggtgggggacggtgaggcccagtgggagagactggcctctttccacttctgcagggctgggggctgaaggtgggtgctgggtcacaaggcctgagtcctgcgggaactggcaacttctgtgtgtttggggctttacctgtgctgtctcactcttcttcctgggaatggggagggagggaagccaaagctagccatgaagaggaactgtttccggccgggcgcggtggctcacgcctgtaatcccagcactttgggaggccgaggcgggcggatcacgaggtcaggagatcgagaccatcctggctaacacagtgaaaccccgtctctactaaaaataccaaaaattagccgggtgtggtggcgggcgcctgtagtcccagctactcgggaggctgaggcaggagcatggcgtgaacccgggaggtggagcttgcagtgagccgagattgcgccactgcactccagcctgggcaacacagcgagactccgtctcaaaaaaaaaaaaataataaagaactgaagaggaactgtttctcccctcaggcgtcttggctgcccacaagataatggctagctccccagacatggacctggccacagtttctgctctcagggtaggtgcagatgaaagggagaaaggagactgagtccctgtggggctgggtgtgagaggcaggagtgtgtgctgtagcccccaccccagtgagggcaggggccctgggctggggtctcatggaccccacctcctcgccctgctgattgctcttgggacctgggtggtgggcgtgtgtacagctgataggagggtgttgttctggaatggagttccctgcacagggttaaagtttcgaggggtcctctgggggcctggcaggtggggccacagcctggcagccaaggaacacacctgggggctgcttgagaccaccactcccacgtggagagcccggtctggaggacggcagtcccaggctgggggcagattggtggcatggatggagggtccttttctgtctgcagcagggacatattccacacagagttcttcctccatttctgggtgggaagggtcatcaagggggtggtcagagccctgagcccccagccctgcccacccccaactccagcattctctgtgccattctacctgtggggctcttggcttggtgggggtacagacagccacgggaccaggctgagcccacctgttgcccctgcagaagatgggggtgaagttgacaccccacaacaaggagacggtgcagcacagtgatgtgctcttcctggctgtgaagccacacatcatccccttcatcctggatgaaataggcgccgacattgaggacagacacattgtggtgtcctgcgcggccggcgtcaccatcagctccattgagaaggtagcaccgcaggcccagtggggtgtggagaggggctgtctagagcccgggccctcagtacttcagttttcatctgcaaaagggttgcagcgtcccggcccactgggagagctcgggcactgcttggtggggtgagtgcatctaggcactgcgtccatggccagacggacacgctggtttctcttccagaagctgtcagcgtttcggccagcccccagggtcatccgctgcatgaccaacactccagtcgtggtgcgggagggggccaccgtgtatgccacaggcacgcacgcccaggtggaggacgggaggctcatggagcagctgctgagcagcgtgggcttctgcacggaggtggaagaggacctgattgatgccgtcacggggctcagtggcagcggccccgcctacgtaaggactgcgggggaagctggcggcggcgggcacttcccgggaccaccgggcacatctgtccctgctccccctgggagggccagggtggagggctccaaggctgtgggaactggagcttgcccagaagggaaggaggagaagcccaggagagaggctcagggtgccttctccccacaggcattcacagccctggatgccctggctgatgggggtgtgaagatgggacttccaaggcgcctggcagtccgcctcggggcccaggccctcctggtcagtgtgtttcctgaccctctggtggggccactctttgcggggccctggggcttcactgggaggagccaagtggggcgtcagtgtgtgctacagtggctggggcagtgccccgcagaggcaggtgcgtgcccacagccgtcagcctttcttctggctgcagggggctgccaagatgctgctgcactcagaacagcacccaggccagctcaaggacaacgtcagctctcctggtggggccaccatccatgccttgcatgtgctggagagtgggggcttccgctccctgctcatcaacgctgtggaggcctcctgcatccgcacacggtgggcccccgcgctgcccgcttccctggtctccagtccttgcatggcagaggcctctctcacacacatctgctcattcacgcactcagcagatacgtattgagctccagcccagtgttgcgcaggacacagggggccccgaggttccctgggttactgtgggcagtgcccctccccaccttccgtttcctgcgaggagggaacatccatagagggacccggatgctgtgccctgtgctccccacataggttcaccattgtcatagctaggagtgtcatttgagccaggggccacaccagtggggtggcggggtggccagccacattaggaaacttctgtgggggcccaccttcctcctgccctcgctgtgggattaagttagaccagtaggacacgcagcaacatccaggcacaaggaaaattccatggaaggtgaaagaagcaaagagcaagagaaagacagagtttgctgtttgcctgggatcccacagctggtcaaaggcagagccaggctgggagccgctgtccccagttcaggtctgcagggtgggtgaggacgtctttctcgccacactgcccactctccagtccagacaccctcagactctgcgagtgccaccctgtaacagtgaggggaacacgaggggcctggcctcacctccagcctgcaggggagacaggtgtaaacccacatcccgtggtggggccacgagaactcaggtctggggggcactgcggggagatttggtgatgctgagctgattcgaatgaggtgagaaggagcccagcagctgtgtgggggcgtgtcgctggcagaggggaataaaggtgctgaggtgagggtgacagcatcgcccagggctgactggcactgggagctgtgggcttcactccctcttcctgggtgcacgcttgtgctccaaagccaacctctccctgcctctctagggagctgcagtccatggctgaccaggagcaggtgtcaccagccgccatcaagaagaccatcctggacaaggtgaagctggactcccctgcagggaccgctctgtcaccttctggccacaccaagctgctcccccgcagcctggccccagcgggcaaggattgacacgtcctgcctgaccaccatcctgccaccaccttctcttctcttgtcactagggggactagggggtccccaaagtggcccactttctgtggctctgatcagcgcaggggccagccagggacatagccagggaggggccacatcacttcccactggaaatctctgtggtctgcaagtgcttcccagcccagaacaggggtggattccccaacctcaacctcctttcttctctgctcccaaaccatgtcaggaccaccttcctctagagctcgggagcccggaggg

SEQ ID NO: 13634 - DNA, 949 bp, Homo sapiens
gccctggccaagggcttcacagcagcaggcgtcttggctgcccacaagataatggctagctccccagacatggacctggccacagtttctgctctcaggaagatgggggtgaagttgacaccccacaacaaggagacggtgcagcacagtgatgtgctcttcctggctgtgaagccacacatcatccccttcatcctggatgaaataggcgccgacattgaggacagacacattgtggtgtcctgcgcggccggcgtcaccatcagctccattgagaagaagctgtcagcgtttcggccagcccccagggtcatccgctgcatgaccaacactccagtcgtggtgcgggagggggccaccgtgtatgccacaggcacgcacgcccaggtggaggacgggaggctcatggagcagctgctgagcagcgtgggcttctgcacggaggtggaagaggacctgattgatgccgtcacggggctcagtggcagcggccccgcctacggagctgcagtccatggctgaccaggagcaggtgtcaccagccgccatcaagaagaccatcctggacaaggtgaagctggactcccctgcagggaccgctctgtcaccttctggccacaccaagctgctcccccgcagcctggccccagcgggcaaggattgacacgtcctgcctgaccaccatcctgccaccaccttctcttctcttgtcactagggggactagggggtccccaaagtggcccactttctgtggctctgatcagcgcaggggccagccagggacatagccagggaggggccacatcacttcccactggaaatctctgtggtctgcaagtgcttcccagcccagaacaggggtggattccccaacctcaacctcctttcttctctgctcccaaaccatgtcaggaccaccttcctctagagctcgggagcccggaggg

SEQ ID NO: 13635 - DNA, 2855 bp, Homo sapiens
ctgggtgcgggtgccgcgtggcggccgcagcgctgaggggtgggtacgacccgcgcacggtagctgggttggggtcgggctccgggaatggtgggcggcggtcgccgggtggggcgcgacggtagcccagttctgggcggggtgggaacccagacgggggacccctaggcgccgggccctccctctccccgtacttttcccccttcccagtcatttcttctgcggaacctccacccctccagtgggtgcgggaccctaggcagcaggccaggcaccgccgctctgactgggggccccgaagcagttaacgggccggacagcaaagtggaaagttagaccagctgggaccaggggaggtgggcacccggctgcgggaggagcggccaggctggcactgcccccctaacttgctctcgatcctgccggtctcgtcccgcagagccggtgccatctgtgggggctttgggccaggggtctccggacagcatgagcgtgggcttcatcggcgctggccagctggcttttgccctggccaagggcttcacagcagcaggtaggcccccaggtgggggacggtgaggcccagtgggagagactggcctctttccacttctgcagggctgggggctgaaggtgggtgctgggtcacaaggcctgagtcctgcgggaactggcaacttctgtgtgtttggggctttacctgtgctgtctcactcttcttcctgggaatggggagggagggaagccaaagctagccatgaagaggaactgtttccggccgggcgcggtggctcacgcctgtaatcccagcactttgggaggccgaggcgggcggatcacgaggtcaggagatcgagaccatcctggctaacacagtgaaaccccgtctctactaaaaataccaaaaattagccgggtgtggtggcgggcgcctgtagtcccagctactcgggaggctgaggcaggagcatggcgtgaacccgggaggtggagcttgcagtgagccgagattgcgccactgcactccagcctgggcaacacagcgagactccgtctcaaaaaaaaaaaaataataaagaactgaagaggaactgtttctcccctcaggcgtcttggctgcccacaagataatggctagctccccagacatggacctggccacagtttctgctctcagggtaggtgcagatgaaagggagaaaggagactgagtccctgtggggctgggtgtgagaggcaggagtgtgtgctgtagcccccaccccagtgagggcaggggccctgggctggggtctcatggaccccacctcctcgccctgctgattgctcttgggacctgggtggtgggcgtgtgtacagctgataggagggtgttgttctggaatggagttccctgcacagggttaaagtttcgaggggtcctctgggggcctggcaggtggggccacagcctggcagccaaggaacacacctgggggctgcttgagaccaccactcccacgtggagagcccggtctggaggacggcagtcccaggctgggggcagattggtggcatggatggagggtccttttctgtctgcagcagggacatattccacacagagttcttcctccatttctgggtgggaagggtcatcaagggggtggtcagagccctgagcccccagccctgcccacccccaactccagcattctctgtgccattctacctgtggggctcttggcttggtgggggtacagacagccacgggaccaggctgagcccacctgttgcccctgcagaagatgggggtgaagttgacaccccacaacaaggagacggtgcagcacagtgatgtgctcttcctggctgtgaagccacacatcatccccttcatcctggatgaaataggcgccgacattgaggacagacacattgtggtgtcctgcgcggccggcgtcaccatcagctccattgagaaggtagcaccgcaggcccagtggggtgtggagaggggctgtctagagcccgggccctcagtacttcagttttcatctgcaaaagggttgcagcgtcccggcccactgggagagctcgggcactgcttggtggggtgagtgcatctaggcactgcgtccatggccagacggacacgctggtttctcttccagaagctgtcagcgtttcggccagcccccagggtcatccgctgcatgaccaacactccagtcgtggtgcgggagggggccaccgtgtatgccacaggcacgcacgcccaggtggaggacgggaggctcatggagcagctgctgagcagcgtgggcttctgcacggaggtggaagaggacctgattgatgccgtcacggggctcagtggcagcggccccgcctacgtaaggactgcgggggaagctggcggcggcgggcacttcccgggaccaccgggcacatctgtccctgctccccctgggagggccagggtggagggctccaaggctgtgggaactggagcttgcccagaagggaaggaggagaagcccaggagagaggctcagggtgccttctccccacaggcattcacagccctggatgccctggctgatgggggtgtgaagatgggacttccaaggcgcctggcagtccgcctcggggcccaggccctcctggtcagtgtgtttcctgaccctctggtggggccactctttgcggggccctggggcttcactgggaggagccaagtggggcgtcagtgtgtgctacagtggctggggcagtgccccgcagaggcaggtgcgtgcccacagccgtcagcctttcttctggctgcagggggctgccaagatgctgctgcactcagaacagcacccaggcca

SEQ ID NO: 13636 - DNA, 767 bp, Homo sapiens
ctgggtgcgggtgccgcgtggcggccgcagcgctgaggggtggagccggtgccatctgtgggggctttgggccaggggtctccggacagcatgagcgtgggcttcatcggcgctggccagctggcttttgccctggccaagggcttcacagcagcaggcgtcttggctgcccacaagataatggctagctccccagacatggacctggccacagtttctgctctcaggaagatgggggtgaagttgacaccccacaacaaggagacggtgcagcacagtgatgtgctcttcctggctgtgaagccacacatcatccccttcatcctggatgaaataggcgccgacattgaggacagacacattgtggtgtcctgcgcggccggcgtcaccatcagctccattgagaagaagctgtcagcgtttcggccagcccccagggtcatccgctgcatgaccaacactccagtcgtggtgcgggagggggccaccgtgtatgccacaggcacgcacgcccaggtggaggacgggaggctcatggagcagctgctgagcagcgtgggcttctgcacggaggtggaagaggacctgattgatgccgtcacggggctcagtggcagcggccccgcctacgcattcacagccctggatgccctggctgatgggggtgtgaagatgggacttccaaggcgcctggcagtccgcctcggggcccaggccctcctgggggctgccaagatgctgctgcactcagaacagcacccaggcca

SEQ ID NO: 13637 - DNA, 1846 bp, Homo sapiens
gcgcacggtagctgggttggggtcgggctccgggaatggtgggcggcggtcgccgggtggggcgcgacggtagcccagttctgggcggggtgggaacccagacgggggacccctaggcgccgggccctccctctccccgtacttttcccccttcccagtcatttcttctgcggaacctccacccctccagtgggtgcgggaccctaggcagcaggccaggcaccgccgctctgactgggggccccgaagcagttaacgggccggacagcaaagtggaaagttagaccagctgggaccaggggaggtgggcacccggctgcgggaggagcggccaggctggcactgcccccctaacttgctctcgatcctgccggtctcgtcccgcagagccggtgccatctgtgggggctttgggccaggggtctccggacagcatgagcgtgggcttcatcggcgctggccagctggcttttgccctggccaagggcttcacagcagcaggtaggcccccaggtgggggacggtgaggcccagtgggagagactggcctctttccacttctgcagggctgggggctgaaggtgggtgctgggtcacaaggcctgagtcctgcgggaactggcaacttctgtgtgtttggggctttacctgtgctgtctcactcttcttcctgggaatggggagggagggaagccaaagctagccatgaagaggaactgtttccggccgggcgcggtggctcacgcctgtaatcccagcactttgggaggccgaggcgggcggatcacgaggtcaggagatcgagaccatcctggctaacacagtgaaaccccgtctctactaaaaataccaaaaattagccgggtgtggtggcgggcgcctgtagtcccagctactcgggaggctgaggcaggagcatggcgtgaacccgggaggtggagcttgcagtgagccgagattgcgccactgcactccagcctgggcaacacagcgagactccgtctcaaaaaaaaaaaaataataaagaactgaagaggaactgtttctcccctcaggcgtcttggctgcccacaagataatggctagctccccagacatggacctggccacagtttctgctctcagggtaggtgcagatgaaagggagaaaggagactgagtccctgtggggctgggtgtgagaggcaggagtgtgtgctgtagcccccaccccagtgagggcaggggccctgggctggggtctcatggaccccacctcctcgccctgctgattgctcttgggacctgggtggtgggcgtgtgtacagctgataggagggtgttgttctggaatggagttccctgcacagggttaaagtttcgaggggtcctctgggggcctggcaggtggggccacagcctggcagccaaggaacacacctgggggctgcttgagaccaccactcccacgtggagagcccggtctggaggacggcagtcccaggctgggggcagattggtggcatggatggagggtccttttctgtctgcagcagggacatattccacacagagttcttcctccatttctgggtgggaagggtcatcaagggggtggtcagagccctgagcccccagccctgcccacccccaactccagcattctctgtgccattctacctgtggggctcttggcttggtgggggtacagacagccacgggaccaggctgagcccacctgttgcccctgcagaagatgggggtgaagttgacaccccacaacaaggagacggtgcagcacagtgatgtgctcttcctggctgtgaagccacacatcatccccttcatcctggatgaaataggcgcc

SEQ ID NO: 13638 - DNA, 578 bp, Homo sapiens
gcgcacggtagctgggttggggtcgggctccgggaatggtgggcggcggtcgccgggtggggcgcgacggtagcccagttctgggcggggtgggaacccagacgggggacccctaggcgccgggccctccctctccccgtacttttcccccttcccagtcatttcttctgcggaacctccacccctccagtgggtgcgggaccctaggcagcaggccaggcaccgccgctctgactgggggccccgaagcagttaacgggccggacagcaaagtggaaaagccggtgccatctgtgggggctttgggccaggggtctccggacagcatgagcgtgggcttcatcggcgctggccagctggcttttgccctggccaagggcttcacagcagcaggcgtcttggctgcccacaagataatggctagctccccagacatggacctggccacagtttctgctctcaggaagatgggggtgaagttgacaccccacaacaaggagacggtgcagcacagtgatgtgctcttcctggctgtgaagccacacatcatccccttcatcctggatgaaataggcgcc

SEQ ID NO: 13639 - DNA, 4945 bp, Homo sapiens; identical to SEQ ID NO: 13615

SEQ ID NO: 13640 - DNA, 1904 bp, Homo sapiens
ggattcgctggcgcgacgggggcggggcctgggtgcgggtgccgcgtggcggccgcagcgctgagggagccggtgccatctgtgggggctttgggccaggggtctccggacagcatgagcgtgggcttcatcggcgctggccagctggcttttgccctggccaagggcttcacagcagcaggcgtcttggctgcccacaagataatggctagctccccagacatggacctggccacagtttctgctctcaggaagatgggggtgaagttgacaccccacaacaaggagacggtgcagcacagtgatgtgctcttcctggctgtgaagccacacatcatccccttcatcctggatgaaataggcgccgacattgaggacagacacattgtggtgtcctgcgcggccggcgtcaccatcagctccattgagaagaagctgtcagcgtttcggccagcccccagggtcatccgctgcatgaccaacactccagtcgtggtgcgggagggggccaccgtgtatgccacaggcacgcacgcccaggtggaggacgggaggctcatggagcagctgctgagcagcgtgggcttctgcacggaggtggaagaggacctgattgatgccgtcacggggctcagtggcagcggccccgcctacgcattcacagccctggatgccctggctgatgggggtgtgaagatgggacttccaaggcgcctggcagtccgcctcggggcccaggccctcctgggggctgccaagatgctgctgcactcagaacagcacccaggccagctcaaggacaacgtcagctctcctggtggggccaccatccatgccttgcatgtgctggagagtgggggcttccgctccctgctcatcaacgctgtggaggcctcctgcatccgcacacgggagctgcagtccatggctgaccaggagcaggtgtcaccagccgccatcaagaagaccatcctggacaaggtgaagctggactcccctgcagggaccgctctgtcaccttctggccacaccaagctgctcccccgcagcctggccccagcgggcaaggattgacacgtcctgcctgaccaccatcctgccaccaccttctcttctcttgtcactagggggactagggggtccccaaagtggcccactttctgtggctctgatcagcgcaggggccagccagggacatagccagggaggggccacatcacttcccactggaaatctctgtggtctgcaagtgcttcccagcccagaacaggggtggattccccaacctcaacctcctttcttctctgctcccaaaccatgtcaggaccaccttcctctagagctcgggagcccggagggtcttcacccactcctactccagtatcagctggcacgggctccttcctgagagcaaaggtcaaggaccccctctgtgaaggctcagcagaggtgggatcccacgccccctcccggcccctccctgccctccattcagggagaaacctctccttcccgtgtgagaagggccagagggtccaggcatcccaagtccagcgtgaagggccacagcccctcttggctgccaagcacgcagatcccatggacatttggggaaagggctccttgggctgctggtgaacttctgtggccaccacctcctgctcctgacctccctgggagggtgctatcagttctgtcctggccctttcagttttataagttggtttccagcccccagtgtcctgacttctgtctgccacatgaggagggaggccctgcctgtgtgggagggtggttactgtgggtggaatagtggaggccttcaactgattagacaaggcccgcccacatcttggagggcatctgccttactgattaaaatgtcaatgtaatctaatgcaaaa

SEQ ID NO: 13641 - DNA, 4945 bp, Homo sapiens; identical to SEQ ID NO: 13615

SEQ ID NO: 13642 - DNA, 1740 bp, Homo sapiens
ggattcgctggcgcgacgggggcggggcctgggtgcgggtgccgcgtggcggccgcagcgctgagggagccggtgccatctgtgggggctttgggccaggggtctccggacagcatgagcgtgggcttcatcggcgctggccagctggcttttgccctggccaagggcttcacagcagcaggcgtcttggctgcccacaagataatggctagctccccagacatggacctggccacagtttctgctctcaggaagatgggggtgaagttgacaccccacaacaaggagacggtgcagcacagtgatgtgctcttcctggctgtgaagccacacatcatccccttcatcctggatgaaataggcgccgacattgaggacagacacattgtggtgtcctgcgcggccggcgtcaccatcagctccattgagaagaagctgtcagcgtttcggccagcccccagggtcatccgctgcatgaccaacactccagtcgtggtgcgggagggggccaccgtgtatgccacaggcacgcacgcccaggtggaggacgggaggctcatggagcagctgctgagcagcgtgggcttctgcacggaggtggaagaggacctgattgatgccgtcacggggctcagtggcagcggccccgcctacgcattcacagccctggatgccctggctgatgggggtgtgaagatgggacttccaaggcgcctggcagtccgcctcggggcccaggccctcctgggagctgcagtccatggctgaccaggagcaggtgtcaccagccgccatcaagaagaccatcctggacaaggtgaagctggactcccctgcagggaccgctctgtcaccttctggccacaccaagctgctcccccgcagcctggccccagcgggcaaggattgacacgtcctgcctgaccaccatcctgccaccaccttctcttctcttgtcactagggggactagggggtccccaaagtggcccactttctgtggctctgatcagcgcaggggccagccagggacatagccagggaggggccacatcacttcccactggaaatctctgtggtctgcaagtgcttcccagcccagaacaggggtggattccccaacctcaacctcctttcttctctgctcccaaaccatgtcaggaccaccttcctctagagctcgggagcccggagggtcttcacccactcctactccagtatcagctggcacgggctccttcctgagagcaaaggtcaaggaccccctctgtgaaggctcagcagaggtgggatcccacgccccctcccggcccctccctgccctccattcagggagaaacctctccttcccgtgtgagaagggccagagggtccaggcatcccaagtccagcgtgaagggccacagcccctcttggctgccaagcacgcagatcccatggacatttggggaaagggctccttgggctgctggtgaacttctgtggccaccacctcctgctcctgacctccctgggagggtgctatcagttctgtcctggccctttcagttttataagttggtttccagcccccagtgtcctgacttctgtctgccacatgaggagggaggccctgcctgtgtgggagggtggttactgtgggtggaatagtggaggccttcaactgattagacaaggcccgcccacatcttggagggcatctgccttactgattaaaatgtcaatgtaatctaatgcaaaa

SEQ ID NO: 13643 - DNA, 20922 bp, Homo sapiens
aggtcaaccagaatcaagatgtctgggactgaggaagcaattcttggaggacgtgacagccatcctgctgctggcggcggctcagtgttatgctttggacaggtaactgtggttccttcatgccgggaaagaatgaggtgaagtgagtaaagttagggcaaggcagtttgtagagcatcgtagtacatgtgtgagcagtacctagtacgtttacctagtacgtgtgtgagcagtacctagtacgtttacctagtacgtgtgtgagcagtacctagtacgttgacgcggtgcgtgcgggggcagtacctagtacgtttacatagtacatgtgtgagctatttgttattggtttttcctttagatgcattttttgggagtcttgtgaactctggagggcattttggaatgttagctatcaaaagactgatagtactggggattagatttagattttaaattttttgtggggggggatagataacatatttgtatgacatcaaattcaaaatgaaactgtgaaaatctccctatttcctattgcccctgtgtgcatgccacccagttctatttcttttttttttcgagactgagtcttgctttgtcacccaggctgcagtgcagtggtgcgatctcagctcactgcaacttccaccctctggattcaagcaattctcctgcctcagcctcccaagtagctgggataacaggcatgcaccaccatggccagctaatttttatatttttagtagagatggggtttaaccatgttggccaggctggtctcgaactcctgacctcaggtgatccgcctgcctcggcctcccaaagtgtttggattacaggcgtgagccaccacgcccgggcttaatttttttgtatttttagtagagatgtggtttcaccatgttggccagggtagtcttgaactcctgacctcgtgatctgcctgcctcggcctcctaaatgctggaattacaggcatgagccaccgcgcctggctccagttgtctttcttggaggcatggaaagttactgggggtcctattccttgtagggacattgtgtgcacagaaaagagtttcttgctttgtccacccaaactccatctttgtctttagcagagagttgtgagtattcatctcatctgagcagggcaagggggacaaaacccaaatcagcaagcagtagtgtgtttctgtttgtgcaggatgggaaattgttgtattggagaaggcgtcaatctctggaaaggacaaatggaagcaaggcttcctacccccgtgctctttccgtacttgcttcctgtgctgacgtcatttacagatctggaggcagaacattttagcttcctaagcttcagaaacatttataaggatggtagcagcagctaaggcagcagttctcaaaatgcagttctcaaaaaccctggggtttctgaagatctttcagagtccagaaggtcaaaattatcttcataataatactatttgcctctttcacactcattgtctcatgagtgaatggtagagttttcagagagtgcatgatatgtggtgatgtcactgctatgatgcctaatggcatgcatgccttaaaagtttctcagttttgattcctaataggatacatagaacccacataaacaaaggttctggggggtctttttaagagtataaagtctccataaaggatggagactcaatgatgtgaggaatggtggaagtgtgaatttaattttcttttttggggttgcagtgccagtacacagcagaagagtaccaggccatccagaaggccctgaggcagaggctgggcccagaatacataagtagccgcatggctggcggaggccagaaggtaggagaattcatgtgcctggaaagcaggcatccataccgcagactccgatggtcttgccagttccctctctgggtcctcagggattcggaagtctgctgttaactgttcctggaggtctcccagtgcccctgggaggggatgggttccagacttcattctcatccgaaggggcctgggcatggtcttgacactcgcataaccgccgtcttaagatttttacatcatctttttttttttttatttttaaagacagggtcttgctctgtcacctaggctggagtccgaccagtggtgtcatctcagctcactgcagcctccacctcccaggctcaagcgatcctcctgcctcagcttcctgactagctgggactacaggcacacgccaccacacctggttaattttttaatgttctgtagagacgacatctcgccatgttgcccaggctgatctcgaactgctgggctcaagtgatcctcccacctcggcctcccaaagtgctgggattacaggtgtgggccaccatgcccagcctttacaccattaaaaaaaaaatgttccttttgccatttgctttttttttttaattaaacactttttaaagaacttatgattgacacataataattgcatatcatttgcttctaattttaacttctgtgtatatttttggtcttccataaaatatgtcaaacagatttgtactttttgcaaactgaattttagcaactgctgggtgagttcctcctcccaacagaccattcgttctcgcgggctccatctagaagatttttgaaataaattcattgagaattttcttgaaaaaaaaattttttttaacagactggttctcactctgtcacttaggctggagtgcagtggcacgatcctagcttactgcagccttgagctcctgggctcaagtgatcctcccacctcagcctcccgagaagaatgtttaaggacagtttatcgaaaaaagtagatgaggaataaattatgtcaattttgattcacatttaagtgtggtaaggaattaacacagcttttccttaaaaacatttgtttttctaggtgtgctacattgagggtcatcgggtaattaatctggccaatgagatgtttggttacaatggctgggcacactccatcacgcagcagaatgtgggtgagtatgctctccagcagtggggacttctgcactgtccagctcctgctgaaagtctgctgtgggtgaggaggtaaggtaggtggactcagctgccagcaggaggaatggttgtggcccagcggtcagtgtcctcttcaacttgctctctttcccactcctagattttgttgacctcaacaatggcaagttctacgtgggagtctgtgcatttgtgagggtccagctgaaggtgaggggatggagtagacctgctgcccggaaggatcagtgggtggtaggagaaggtgagcaggtagggaagtaggtagctggacggggacccaggctccagagttgtgtctcagccagcgttccctagagtggtggaattcaaatactcttgctcatgtgctccctaaaagaatggaaaaactgttctcttgcacatgttcaagctgacacctaaaagttttcaccatatataaaaattgttgcaaaggatgtattttttggcatatggtaaaatctgacattttaaaatacaataattttaccatcactgataagtgtttggaaactcaactttaggcaaagcaggtccttttgttataacattgatgaaaacaaaaatatgttttgttaataagttgtttcacttcaagtcacagttatttaaggtgttaagtgagcacttaccgtaaatctgttgaatcttgttaaatattccagtggactctaaatactatagaggataagatctatcatttatttgaagaaatacaatgaacaagcttttttttaatcattagaaattttacattgttctttctttatctgaactcatatttctattctatttccccactggttttaatcctaatacatatttatggttgaaagtttggctaggcggggtggctcattcgtgtaaccccagcactttgggaggcccaggtggaaggactgcttgagcccagggatttgagaccagcctgggcaacatagcgaaagcccgtctctactaaaaatacaaaaaattagctgggcatggtggtgtatgcttgtagtcctagctactcaagaggctgaggtgggaggatcacctgagcccaggaagtcgaggctgtggtgagctgtgattgcgccactgaactcctgggtggaaaaaaagaaaagttttatcggtagccttactgtgcttctctgcctttgcctgtgtataaaaataaaaatttttggtaaattttcagtgcacttaaggctctaaatattaaaatatttcttttggatttagttatattatagctactgttaacacacaattgaccagacaattgtgtttatggtgaagagaaaacataaatacagcaaaattttgatacttagaaaaattaaagatatgaaatcttgccacaaaaataaaaaatttaaaatataaaatttatggaaaatgtatatcttaatgagatggatggtgctgttttttcttttcagttagtttatatatccatatatccataactgaatattacttacttcttttttttttttgagatggagttttgctcttgttgcccaggctggagggcaatggttcaatctcagctcaccgcaacctccacctcctgggttcaagcgattctcctgcctcagcctcccaagtagctgggattacaggcatgcgccaccccgcccgcctaattttttgtgtgtgttttcagtagagacgcggtttctccatgttggtcaggctggtctggaactcacaacctcaggtgatccacccgccttggcctccaaaagtgctgggattacaggcgtgagccaccgcacccggcctacttatttcttgaatgaacaattcagcattaattctattctgacttatttttctaaatagtactaaaaaatcttgtatctatgagtgagtagctgagaatggaaagaattgtgttatagtgtcactcatttatttgagtgctttctgagttattttttaaaaatcacagagcgctgtcatcaaacattgtatttaattctcaatcagcgaatgatgtgctcaggtccaccttctcttttggtgagaggcaggagctggacgccacctgatttacaaagggtttgctctcccgtccttacagaccattagatccagtgttcaaatcatccctttgtttcatatcccagaggtttttttttttccaagacgtagtctcactctatcacccaggctggagtgcagtggtgcaatctcggctcactgcaacctctgcctcccaggttcaagtgattctcctgcctcagtctcctgagtagctgggattacaggtgcccaccaccacacccggctaatttttgtatttttagtagagatagggtttcaccatgttgaccaggctggtcttgaactcctgacctcaagtgatccacctcccttgacctcccaaagggctgggattacagcgtgagccaccacgcccggcccggccatcccagaggttttttttaccttagggtgatgcacactgataggatttggggtgagtttctaatgtgccctttgtgtgttgggaagttgggaagggaggatcgtcttgacaccttgaccgcaggcacatgtccaggcagcccaggtctaggaagcagcactcgcgatggattctcacccagccttctgcccgtgcccctgtagcaaggccgccaggtgggagagtccggctttgaaccctgctgcttgaggaacaggggagttgtggcacgcctgccgctctcgtgtttgagttcaaactccttttctgcccccaggatggttcatatcatgaagatgttggttatggtgttagtgagggcctcaagtccaaggctttatctttggagaaggcaaggaaggaggcggtgacagacgggctgaagcgagccctcaggtgagcgcggggctgggagtctaacctgcgtcatttcagctcttgcttcagagcagatttcgattttttttggaagaggtaacacatccacatggttcaaaaatccaagcagcgtggaaggtaattctcacccctgccctggttcctgtctgccgttttcccactttcgttagtattttttcaatgtttctgtttcaggcttcccttgctgggagtaagtggtagaatcctgtactctctcttctccgtgcactcagtcatgtgtgccggaggccttcccactcctactgcgagtgcacagacagcaccctcctctccgtgctcctcagcagtcctccgctacgcacaggtagcatagttaacgtagttacacagtcacgcagatgtccgtgttagtccatttatgttgctatacaggaataccagaggctgggtaatttataaataaaggaggtttgattggcttatgattctgtggactgtactggaagcctggtgccagcatccacttctgctgaggcctcaggaagcttctaatcatggcagaaggtgaagagggaacgtggagagagagggagcaagagagagaaggaaggagtcccaggcttatttatttattttattgttgtttttcattttttgagacagggtcttgctctgttgcacaggctggggtgcagtggtgccgtcatcgctcagtgcagccttgaactcctgggctgaagtgatcttcccgcctcagcctcccgagtagctgggatcacaggcacataacaccacccccagttaattaaaaaaaaatttttttttttttggagagacagggtctccctttgttgcctaggctggtctcaaactcctgggctcaagtcatcctcctgccttgtgcctcccaaagtgccgggatcacaggcatgagccatcatgcccagcccccacactcaaaaccaccagatctctcatgagctgagtgagaactcactcaacaccaaggggatggcactaagctgtttatgaggaatccagccccaggatccagtacctcccaccaggccgcaccccccggcattggaggtcacgtttcaacatgaaatttggaggggataaacatccaaaccatatccgtgtctttgagaattgaagtgaattgaaccagaaaaacctatgagttctgtgggggagtccgtagatcccaagttaagaactctggtcatgggaggttgtgcccttgagcccccggtccccaagtgtgtgttgcctactcctgctgggaaattggagcagcctttggggggaaaaaaaagaaaaactctctgcagtttgttctccatgtcaggaggtggctggtgggttttgtgaatggcgccgtaatcttttcatactcatcttctctgtgagggcagggacttgtgtcttgtcctcactgcagtattctcagaaactaacacagtgcaggaacatgctagatgcttaccagacatcaatggggaatgcatgttagggtccacttcctctgctgctcctgagaagcaacctgtacaaaagttgtaattctattctctgatattcatgtgtaacaattcttaaccctgtttcacctttttttctcttgcccttaggagttttgggaatgcacttggaaactgtattctggacaaagactacctgagatcactaaataagcttccacgccaggtatatcagacatggatgagtggagtgaagataatgcggcaaactcttgtgtgtcatgggttgagtatttggaggatgcaaggagaaaaagtgaggactcagctctttagagggtcgggaatgttgatttcagatttcgaatgttagagacagcaggaactaatcccaacattttccttttttctaaagtacatcatgtgggccggggaccgtggctcacgcctggaatcccagcactttgggaggtggaggcaggtggatcacaaggtcaggagatcgagaccatcctggctaacacggtgaaaccctgtctctactaaaaatacaaaaaattagccgggcgaggtggtgggcgcctgtagtcccagctactcgggaggctgaggcaggagaatggcgtgaacccgggaggcagagcttgcagtgagccgagatggcaccactgcactccaacctgggcgacagagccagactccgtctccaaaaaaaaaaaaaaaaaaaatcacaccatttgacaagaatgtgaggtctagagaatttgtgtacgtgtaggtagtgaactgtggttgggggtagtctgtgaagcctcaaagcaagcacacagccctctgcagcaccactgtccttcccagacactcccagcctcgctgttgagccttctttcttttccttagttctggtgtcattacatgtctgatgtcattacaatgtcatttacatgtccattatttctgtcaatacctataacgtgatctgagcctttgcctttggagaatggggtctgtggtggggcagccctggagtcacactgccttgccatgagtggcttctggagtgttcctcctgcctcatctgctctccgaggtccctgccatgtcgctccccagggcagcattcccatcctgtgcctgagggattcttgtcctcatggagccccacaaggtgtgtgtcactgggcatctgtaaaaactcctttaaaaaaatcatttttaaacattattggattcagtttgctaatattttgttagacttttttttttgagacggagtctcgctctgtcgcccaggctgaagtgcagtggtgtgatcttggctcactgcaacctctgcctcctgggttccagcgatgctcctgcctcagcctcctgagtagctgggattacaggtgtgtaccaccacgcctggctaatttttgtatttttttagtagagacggggtttcaccatcttggtcaggctggtctcgaattcctgacctcatgattcgcctgcctcggcctcccaaagtgctgagattacaggcgtgagcccccgcgcccggcctttgttaggcatttttgcatctatgtttatgagagatattagtcaagttttctttttctttttttttttttgagatagtctcactctgtcgcccaggctggagtgcagtagtgtgatctcagctcactgcaacctctgcctcccgggttcatgccattctcctgcctcagcctcccaagtcgctgggactacaggtgccagccaccaccatgcccagctaatttttttatttttagtagatggggtttcgtcctgttggccaggctggtcttgaactcctgacctcaagtaatccgcctgcctcggcctccgaaagttttgggatgacaggcgtgagccaccgcacccggccttttctttttttaaattgtagtaaaacacatcacattttaactatttttagtgtgtggtcgagtagtgttaagtgtattcccattgttgtgaaattgatctgcagaactaagaccctgcacccgtaaaacaagaactccgcatttccccctttcccagacccttgtaactacttccactttctttcctttttttttttttttaatttattttatgaaagatgaggtcttgctctgtcagccaggctggaatgcaggagtgccatcataattcactgcatccttgcactcctgggcccaagggatcctcctggatcctcctgcctcagcctctcaggtggctgggactacaggtatgtgccagtgcacctagctaatttattttttaaacaattattactattttttttgtagagacagaatttctcagggctggtcatgaactgctgggctcatgtgatcctcctgcctcggcctcccaaagcgctgggattgcagcgtgggccactgtacctggagccagctaattaactttttttgggggcttttttttttaagaggtgagttcttgctatgttgctgaggctggtcttgatctttttttcttttttaaaaaattaggttaggcgctgtggctcctgcctataatcctagcactttgggaggccgaggtggttagatcacttgagcctaggagtttgagaccaccctggccaacatggtgaaaccctgtctctactaaaaaatacaaaaatcagctgggcatggtggtcagcctgcctgtaatcccggtggtcagcctgcctgtaatcccagctcttctggaggctgaggcatgagaatcgcttgaacctgggaggtggaggctgcagtgagccaagattgcactactgcactccagcctgggagacagagtgagattctgtctcaaaataataataataaaatataaaaataaaatacttttttgtgtgtggtcatggagttttgctattgcccaggctagtctcaaactcctggctacaagcgatcctcccactcagcctccttaagtgctgagattataggtatatgtgtctactttctgtttctgtgaatttgtctactctggatacctcatataaatggaatcacataatttttgctttttgtgactggcttatttcacttagctagcattaatgcctttaagattcatccatgtagtagtgtgtatcagaattcccttctttttgtggctgaatattctgttgtatatatagaccacattttgtttatgcattcatttggtgatggggatttgggttgctttcaacctcttggctattgtgaataatgctgctatgaacgagggtgtgtaactctctttgagatcttgctttcaattcttttagacatattctgaaggggattgctgggtcatggtaatcctatttttaatttttcgaggagctgccacactgattttcatacagttgccccattttaccattccaccaacagggcacatgagttcagatttttctaaatcctaaccagcacttgttattttctgagtttttggttttttttttttttttttttttaagccaacctaatgggcgtgatattttattggggttatgatttgcatacccctgatgattagtgatgttgaccatattttcttttttgagacagaatctcactctgttacccaggctggagtgcagtggcacaatcttggttcactgcaacctctgcctctgggttcaaacaattctcctgtctcagcctcccaagtagctgggactataggcgcctgccaccatgccgggctaatttttgtatttttagtagagatggggtttcaccatgttggtcaggctggtctcgaactcctgacctcaggtgatccgcccgccttggcctcccaaagtgatgggattacaggtgtgagcccccgcacccagccaaccatattttcatatgcttgttggccatctgtttatcgtctttggagagatgtctattcaagtcctttgtcattttattttgttttattattttaatttaatttcttttattcatctcatctcatctcatctcatgacaagatctcgccctgtcacccaggctggaatgcagtggtctgatcatggcttggctccctggagcctcgacatcctgggcttgagtgatcctcccacgcaggctggagggcagtcgtgtgatctcggctcactgcagcctctatatcccagactcaaatgatcctcctgccttagcctcccaagtagctgggactacaggcatttgccaccatgccaggctaatttttttattttttgtacagaatacaaaaaattttaccgtgttgcccaggctggtctcaaactcctggcctcaagtgatccacctgccttggcctcccaaaatgctgggataacaggcgtgagaaacccatatggcccaactcctacttttattgagctttttcgtattgtttttgtattctctctttcacttatgtttgctgtcatctttttagaatttcctttcttctagctttgggtgtaactttttttttctagttctttgaggtatagcgtagatttgagatcttttttttttaactatgtgtgtaacttccctcttacgacttctttccctgcaccccagaagtttggtaggttgtgttgtagtatcatttgtctctgggaattcttctaagttggcttgttacatttcctttgactttaagagtgtggtgtttaatttctactgatttgtggattttccagttttctttttgctgttgatttctagtttcattccattgtgattgaaaagatactttatatgatttcaatcttgaatttgttaggacttgttttgtggcctaacatgtagtctgtcttggagaatgttccatgtgtacttgagaagaatgtattttctgctattggtgggtggaatgttatgtatatgactgttaggtccagttggcctatagtattgttcaaatactctatcgccttattcatcttttgtttggttgttttatctattattgaaagttgagtagtgaagtctcctactattattgtgttgcttttatttcaccttacaatcctctcaaagtttgcttcatatatttaggacctctggtgtttggtgcataaatatttataattgttatatcttcttggtgaattgacattcttttttttttttttgagacggagtctcactctgtcgcccaggctggagtgcagtggcggtgcgatctcagctcactgcaggctctgcctcctgggttcacaccattctcctgcctcagcctcctgagtagctgggactacaggcgcccgccacctacgcccggctaattttttgtatttttagtagagacggggtttcaccatgttagccaggatggtctcgatatcctgacctcgtgatctgcccacctcggcctcccaaaatgctgggattataggtgtgagccactgcacctggctgacattcttatcattatataatactctcgtctcctataacaattttttttttttttttgagacggagtcttgctctgccgcccaggctagagtgcagtggtgcgatcttggctcactgcatcctttgcctcctgggttcaagcagttctcctgcctcagcctcctgagtagctggaactacaggtgcgtgctaccatgcccggctaattttttttttttttgagacagagtttttgctcttgttgcccaggctggggtgcaattgtgtgatctcggctcactgccatctctgcctcccaggttcaggcaattcttctacctcagcctcccaactagctaggactacaggtgtgtgccaccacacccagctaattttttgtattttgtagagagggggtttcaccatgttggtcaggctgatcttggactcttaacctcagatgatccgcccacctcggcctcccaaggtgttgggattacaggcgtgagccaccacgctgagcccagatttttttttttttttttagacagagtcttgctctgtcgcccaggctggagtgcagtggcgctatcttggctcactgcaacctccgcctcccgggttcaagcgattctcgtgcctcagcctcctgagtagctgggactacaggcgcccaccaccacacccaactaatgtttcgtattttttagtagagcggggttttgctgtgttggccaggctggtctcaaactcctgggctcaagtgatcaatccacctgccttggcctcccaaagttctgggattacaggtgtgagccactgagcctggccccaaatttctctttttttgttgttgagacggaatttcactcttgtcaccgaggctggagtgcaatgttgtgatcactgcaacctctgcctcgtgggttcaagcgattctccagcctcagcctcccaagtaactgggattacaggcgcccgccaccatgcccggctaatttttatacttttagtagaaatggggtttcgccatgttggccagggtgatctcaaactcctgacctcaagtgatccacctgcctcagcctcccaaagtgttgggattacaggcatgagccaccatttcctaagtgagcacagctgttcacctcccagatagagaatcagacctttaccagcagcccagaagccccattttgccctcttccagtcactgccttgctttccttttttcaaaagtaactactatcctgtcttctattctgacttccatggattattttttcctgtttttgaactttatatatgtaaagttcacaaatggaattgtactgtaagtggaattgtacagttcatattttaagaaaattgaccgaagtatgaaaaagaacatatagacaggttagacgagtgcacgtatcatccatgctcagcttgatgaattttccaaccaaacacatccacacagccaacatctgaatcaagacactgccagtaccgagaaggcccagctgtgttccttgcagtcactgccatcccctgccctccttcccactctgagcaaaccgcttttaacaacacagattggccgggtgtggtggctcactcctgtaatcccaccacttgagaggccaaggaagaaggattgcttgagcccaagagttggagaccagccaggacaacatagtgggaccctgtctgtacgaaataaaaataaaaataaaaataaaaattagctgggcctggtggtggcgcctgtagtcccagctgcttgggaggctgggctgggagaatcatttgagcctaggaggcccaggctgcagtgagctgtgattacgccactgcactccagcctgggccacagagcgagaccctctctcaaaaaacaaaacaaaaaacaaagaaagccaccaatttgtttttattgttatgtacttttttggaatcctacagtttgaactctttgtatcttacttgaattcagcatggttgtgagattcattcatggtacgagcagcagtttcattgctgtataattttcttttgcatgagtatgtggcaatttatttttctagtcttttcttagtagacattttggtttttgtagcttgtggctgtttcgattagagatgctgttagcattcttttgctgtacagttgcactcatttttgttgggaattattgggggagaagataggtacgtgtttagttttagtaggttcttcccgttttcctgtatggttgtattaattcacaccccacgtggcattgcgtaagttccaattgttctgtatctttgacagcacttggtatcgccagtctttcatatttttcaaagctcgtttcttttttttgagacacagtcttgctctgtcgcccaggctggagtgcggtggtgcgatctccgcccactgcaacctctgtctcccaggtttaagtgattctccctgcctcagcctcccgagtagctgggattgttggtgtgtgccaccatgcccagctaatttttttttttttttttttgtatttttagtagagacaggctgttactcaggagttccttcgattttttttttttgtatttttgtatttttgccattttggccaggctggtcttgaacccctggactcaagtgatctgcttcggcttgccaaagtgctgggattacaggcatgagtcaacgtgcctggccaaagctcatttctttttaaactactcatttatctttcaatgtagacatgaaatctgcactataattttcattttcaggtcaaaatgtaatcatcttaatccctcatattcaaacaattattccatcagcatcagttttatgaattgagagatgttttcccaagtaaaaatgttctggatttctgtaggaatccgtgtggaaatgaaaccatttgccctgtgccacgcagcacaggactgtcccttctcatgttgatgagatgcagagcagccccgttctggaagattccttgcagccttggctggcagccggcgtccgtgcctcccaagggttcttccctctgtcgtttgaagggttcttcgtgatgccacagcgtgcccgaggctccctcagtgacgagcgcgatttgcaggggtggccctggcagaaagggttgggaaggtacagacctccacagagactgtgtgtgctcatttccgtggaaaaaggacaaggaggcagcaaagacagacccagcagcccaggaaagattcaaatgcgattttacagaacatctgccctaagtcaaaaccaaagaaggattcctttttatcaaaacttcactaacacagaacatgaaattgtttggctcctcctgctcatggagttacaggacctagaaggcgtgatggatggaggatgtcaaatgcgattttccaggaatcgcaatctgtgagtcagggagaagcagcggagggcaagagccagttgaaggaatttgtttttcttctttccttctagttgcctcttgaagtggatttaactaaagcgaagagacaagatcttgaaccgtctgtggaggaggcaagatacaacagctgccgaccgaacatggccctgggacacccacagctgcagcaggtgacctccccttccagacccagccatgctgtgataccggcggaccaggactgcagctcccggtatgcggcctaagtcccctcctttcctctgcggcccctcctgtgtcacggggctgcctccactcaggcctccagagccagccagccgtgcgtgtcctcccagcagccgcggctgttgctcaggagcccgtcctcgccgccgccctctcatgcagaagcctgagctcatccgccgtggagagcgaggccacgcaccagcggaagctccggcagaagcagctgcagcagcagttccgggagcggatggagaagcagcaggttcgagtctccacgccgtcagctgagaagagtgagggtgagcgaggggtgggagcagggccctgggaggcgtctgcaggaggaagtgtagccgcagggtcttctgattctctgcggtaaccctgggccggctccaaaccaggcctcgctgggacttctctcaagctacacgcaggagagatgagcccaggaaattcagatatttaaatctgctgtacattttcccgtttctaaagacaatgatttcttttttcccccgtggaactaagtgggccttgataaaatcttctagaattagaaatttcagggtaaagaacttttttttgcttcgaatgctttggccatctctacattagaaagccttggccgggcacggtggctcatgtccgtaatcccagcactttgggaggccaaggtgggcggatcacgtgaggtcaggagtttgagaccagcctggccatcatggcgaaaccccgtctctattaaaaatacataaaaattagccaggtgtggtggtgcatgcctgtggtcccccctactcgggaggctgaggcagaattgcttgaatccagaaggcagaggttgcagtgaaccaagatcgtgccactgcactccagcctgggcaacagagtgagaccctgtctcaaaacaaaaacaaaacaaaaaaaaaacaagccttgtgtttctgagatatcttcgaatacaaggcaaaattgggattgagaataacgggaacttttggcagattatttatcaactttagtttatttcagagtccagattgagtgggaatagtgatacagatgccttctttctttcttctctgtctccccacctgttctctcctgcccatccagcggtaggtagtccttactcagagagtggaaacagagaaagggcttgtctcagacccatcgagcttttgcccagtttttccctacaaattgtgaagcagattcacagaggacttgcttcatggttggttcattcatatgcccctcagcaccgacaggctgaaattaacataaaaaccaaaacagaaccacttcctgtcctgtggatatccttactgttgagttattgcaggtgtttagcttcttaaccattgcagaagctcccgggtagattgtggaggaagctgccctccaggcctttcctgccccttggcagacaacccgagccattgttattttaatccatttcacacatcagattttggctgaagattttgtttgttggtttgttttcagacagggtcttgctctgtcacccagcctggagtgcagtggcgggatcagggttcactgcagctttgaccttcctgagctcaagtgatcctccttcctcagcctcctgagtggctgggactacaagtgcatgctaccacacccgctgatattttattttttgtagaggtggcgtctcgaattcctggtttcaagcgatcctcccaccttggcctcccaaagtgctggggttacaggtgtgagccactgtgcctggtcagattttagtttaagattttgtttgagcaagggttatggctgttaacaagcgagccagacactggattagatggcctgtgagaaaccttttacttttgctgtgaaaggagaaagaaacttgtttttcccactggtgagaagaattcaaaccacagacagatctgtaggtaggactgggactcgggaagctgaagttctttttactggcagaagcagcgcagccctaagcggtgttgtgcttcggagagtgttccctctaacaagaggggagtggacccacgctctgaaatcccatgcagtgatgtgatgatgacttgtcctttctctcctctgtgaaccgtagcagcgcctccggcccctcctgtgacgcacagcactcctgtaactgtctcagaaccactcctggagaaagacttccttgcaggagtgactcaagaattaatcagtaaataccttgaaatgcttgtaagctactgtgctgtatgtttctagtagccacagaataccttttaggcgacataaaaatcctcattttcgtgtggttttgttgagggggttctggctgatagcatatgtccagttcctctttggtcctaaccaaagggaagtgtacttttagggggaggggagagaaattccaaaaactttcagaaggtactgaagacatggaatttctgagggccagtttttccagtgctttctgtgagaatacttcattatttgctgatgacgcacttttccttgacctctgtagagactcttgaagacaactctgaaaagtgggctgtgactcccgatgcaggggatggtgtggtcaagccctcgtctagagcagacccagcccagacctctgacacattagccttgaacaaccagatggtgacccagaacaggactccacacagcgtttgccaccagaaaccacaagcaaaatctggatcttgggacctccaaacttatagcgctgaccaacgcacaacaggtagcagagaggtgtttaggcacaaaaattaaggggagatcctagctttaattctgggaatttttgaggaaggatgacatttcatttaaagtttgatagaatcgggaacttctattagggaatggtactgcaagtagaacagaattgatttaagagccagaacgtttcctttgggctcctgacttcaggtgcagcccttttcagctcctgataatagcaggaagcggaaacgactgcatggagagctgtccctcccagcagcaggtctgtcatgagcacgaggccacttggtctaggagaatcatctgccttcctcctaacagtaattctcattcttgggcttagtctaaattaggatcattaatataatccagaaatcattagctgtcagtttattttaaaattatggcagctacatttaagccattttgtcttccataggaaactgggaatctcataggaagagccaggacatgaagaaaaggaaatatgatccatcttaactgaggctcaggccacataattggactctgtcacaaagggactttggaaaactactttttggtcatgaaattgttcatcgctgctggagaatgaacgtcattgcgatttatcttgcttcattctgaaccttatcaagaggatctgactgagagcccactgcagttagagctgagcacttttgaaaagcttgtccatcactctagtagggagaggctctggacagatgaataccttttcttcggcttgtgaggcttcccactatttattactgaactattatgttaatgaagatggacattttaggaatcaccaatggctccttgccctcaagcaatataggccagacttggtcctaagcacctgcctcagcaattgtctacattcagttgttttgcataacgtctgccttctttcctttacggtccatgcctttaatgttgcccacattaagcactgtggatcacgacaggaaaaaggttggagcagtgcttttcactactttgtatcaatccaggctacaatcttcatttaatataaataatttatggatttatgacattacaatcctgcattgtttcaagactgacattttttcctaaggaaggaaataatcatctaagaccacgaaaaaaggctgttttttgtttttttttttttttttttttttgagacggggtctggctgtgttgccctgactggagttcagtggtgcaaacacagctctctccacaacctcttgggcccaagtgatactcccacctctgccttacaaaatacagggattactggtgtgagccactgtgtctggccagaaaaggcatttttgagaaagcaaatcgtataccttattaacaaaatagaatatatatatattgcttatctgaaatgcttgaaaccagaattgttttgcattttttgaatatttgtatacacataatgagaccttggggatgggacccaagtctgaacgtggaattcacctgtgtttcgtgtatatgcctcatacacataattttgtgcatgaaacagagtttttgtataagaagatacactgcagctgaagagggctgggtttttttttctcttagggtcgctgcataaactgttgtatgcctggtgctttgcgacttgtcacacgaggtcacgtgtggaattttccacttctggcatcacgtcagtgctcagaaattttctgatctcagagcatttcaattagggatgctcaaacgcaactg

SEQ ID NO: 13644 - DNA, 2826 bp, Homo sapiens
aggtcaaccagaatcaagatgtctgggactgaggaagcaattcttggaggacgtgacagccatcctgctgctggcggcggctcagtgttatgctttggacagtgccagtacacagcagaagagtaccaggccatccagaaggccctgaggcagaggctgggcccagaatacataagtagccgcatggctggcggaggccagaaggtgtgctacattgagggtcatcgggtaattaatctggccaatgagatgtttggttacaatggctgggcacactccatcacgcagcagaatgtgggtgagtatgctctccagcagtggggacttctgcactgtccagctcctgctgaaagtctgctgtgggtgaggaggtaaggtaggtggactcagctgccagcaggaggaatggttgtggcccagcggtcagtgtcctcttcaacttgctctctttcccactcctagattttgttgacctcaacaatggcaagttctacgtgggagtctgtgcatttgtgagggtccagctgaaggatggttcatatcatgaagatgttggttatggtgttagtgagggcctcaagtccaaggctttatctttggagaaggcaaggaaggaggcggtgacagacgggctgaagcgagccctcaggcttcccttgctgggagtaagtggtagaatcctgtactctctcttctccgtgcactcagtcatgtgtgccggaggccttcccactcctactgcgagtgcacagacagcaccctcctctccgtgctcctcagcagtcctccgctacgcacaggagttttgggaatgcacttggaaactgtattctggacaaagactacctgagatcactaaataagcttccacgccagttgcctcttgaagtggatttaactaaagcgaagagacaagatcttgaaccgtctgtggaggaggcaagatacaacagctgccgaccgaacatggccctgggacacccacagctgcagcaggtgacctccccttccagacccagccatgctgtgataccggcggaccaggactgcagctcccgaagcctgagctcatccgccgtggagagcgaggccacgcaccagcggaagctccggcagaagcagctgcagcagcagttccgggagcggatggagaagcagcaggttcgagtctccacgccgtcagctgagaagagtgaggcagcgcctccggcccctcctgtgacgcacagcactcctgtaactgtctcagaaccactcctggagaaagacttccttgcaggagtgactcaagaattaatcaagactcttgaagacaactctgaaaagtgggctgtgactcccgatgcaggggatggtgtggtcaagccctcgtctagagcagacccagcccagacctctgacacattagccttgaacaaccagatggtgacccagaacaggactccacacagcgtttgccaccagaaaccacaagcaaaatctggatcttgggacctccaaacttatagcgctgaccaacgcacaacaggaaactgggaatctcataggaagagccaggacatgaagaaaaggaaatatgatccatcttaactgaggctcaggccacataattggactctgtcacaaagggactttggaaaactactttttggtcatgaaattgttcatcgctgctggagaatgaacgtcattgcgatttatcttgcttcattctgaaccttatcaagaggatctgactgagagcccactgcagttagagctgagcacttttgaaaagcttgtccatcactctagtagggagaggctctggacagatgaataccttttcttcggcttgtgaggcttcccactatttattactgaactattatgttaatgaagatggacattttaggaatcaccaatggctccttgccctcaagcaatataggccagacttggtcctaagcacctgcctcagcaattgtctacattcagttgttttgcataacgtctgccttctttcctttacggtccatgcctttaatgttgcccacattaagcactgtggatcacgacaggaaaaaggttggagcagtgcttttcactactttgtatcaatccaggctacaatcttcatttaatataaataatttatggatttatgacattacaatcctgcattgtttcaagactgacattttttcctaaggaaggaaataatcatctaagaccacgaaaaaaggctgttttttgtttttttttttttttttttttttgagacggggtctggctgtgttgccctgactggagttcagtggtgcaaacacagctctctccacaacctcttgggcccaagtgatactcccacctctgccttacaaaatacagggattactggtgtgagccactgtgtctggccagaaaaggcatttttgagaaagcaaatcgtataccttattaacaaaatagaatatatatatattgcttatctgaaatgcttgaaaccagaattgttttgcattttttgaatatttgtatacacataatgagaccttggggatgggacccaagtctgaacgtggaattcacctgtgtttcgtgtatatgcctcatacacataattttgtgcatgaaacagagtttttgtataagaagatacactgcagctgaagagggctgggtttttttttctcttagggtcgctgcataaactgttgtatgcctggtgctttgcgacttgtcacacgaggtcacgtgtggaattttccacttctggcatcacgtcagtgctcagaaattttctgatctcagagcatttcaattagggatgctcaaacgcaactg

SEQ ID NO: 13645 - DNA, 3023 bp, Homo sapiens
attctcctctgcgcggcctccatctaagatctcttccccttgtccatagcctagatcgagctccctgtgtgcaccgcgcgctgcccgaggcgcaggtcaaccagaatcaagatgtctgggactgaggaagcaattcttggaggacgtgacagccatcctgctgctggcggcggctcagtgttatgctttggacagtgccagtacacagcagaagagtaccaggccatccagaaggccctgaggcagaggctgggcccagaatacataagtagccgcatggctggcggaggccagaaggtgtgctacattgagggtcatcgggtaattaatctggccaatgagatgtttggttacaatggctgggcacactccatcacgcagcagaatgtggattttgttgacctcaacaatggcaagttctacgtgggagtctgtgcatttgtgagggtccagctgaaggatggttcatatcatgaagatgttggttatggtgttagtgagggcctcaagtccaaggctttatctttggagaaggcaaggaaggaggcggtgacagacgggctgaagcgagccctcaggagttttgggaatgcacttggaaactgtattctggacaaagactacctgagatcactaaataagcttccacgccagttgcctcttgaagtggatttaactaaagcgaagagacaagatcttgaaccgtctgtggaggaggcaagatacaacagctgccgaccgaacatggccctgggacacccacagctgcagcaggtgacctccccttccagacccagccatgctgtgataccggcggaccaggactgcagctcccgaagcctgagctcatccgccgtggagagcgaggccacgcaccagcggaagctccggcagaagcagctgcagcagcagttccgggagcggatggagaagcagcaggttcgagtctccacgccgtcagctgagaagagtgaggcagcgcctccggcccctcctgtgacgcacagcactcctgtaactgtctcagaaccactcctggagaaagacttccttgcaggagtgactcaagaattaatcaagactcttgaagacaactctgaaaagtgggctgtgactcccgatgcaggggatggtgtggtcaagccctcgtctagagcagacccagcccagacctctgacacattagccttgaacaaccagatggtgacccagaacaggactccacacagcgtttgccaccagaaaccacaagcaaaatctggatcttgggacctccaaacttatagcgctgaccaacgcacaacaggaaactgggaatctcataggaagagccaggacatgaagaaaaggaaatatgatccatcttaactgaggctcaggccacataattggactctgtcacaaagggactttggaaaactactttttggtcatgaaattgttcatcgctgctggagaatgaacgtcattgcgatttatcttgcttcattctgaaccttatcaagaggatctgactgagagcccactgcagttagagctgagcacttttgaaaagcttgtccatcactctagtagggagaggctctggacagatgaataccttttcttcggcttgtgaggcttcccactatttattactgaactattatgttaatgaagatggacattttaggaatcaccaatggctccttgccctcaagcaatataggccagacttggtcctaagcacctgcctcagcaattgtctacattcagttgttttgcataacgtctgccttctttcctttacggtccatgcctttaatgttgcccacattaagcactgtggatcacgacaggaaaaaggttggagcagtgcttttcactactttgtatcaatccaggctacaatcttcatttaatataaataatttatggatttatgacattacaatcctgcattgtttcaagactgacattttttcctaaggaaggaaataatcatctaagaccacgaaaaaaggctgttttttgtttttttttttttttttttttttgagacggggtctggctgtgttgccctgactggagttcagtggtgcaaacacagctctctccacaacctcttgggcccaagtgatactcccacctctgccttacaaaatacagggattactggtgtgagccactgtgtctggccagaaaaggcatttttgagaaagcaaatcgtataccttattaacaaaatagaatatatatatattgcttatctgaaatgcttgaaaccagaattgttttgcattttttgaatatttgtatacacataatgagaccttggggatgggacccaagtctgaacgtggaattcacctgtgtttcgtgtatatgcctcatacacataattttgtgcatgaaacagagtttttgtataagaagatacactgcagctgaagagggctgggtttttttttctcttagggtcgctgcataaactgttgtatgcctggtgctttgcgacttgtcacacgaggtcacgtgtggaattttccacttctggcatcacgtcagtgctcagaaattttctgatctcagagcatttcaattagggatgctcaaacgcaactgtttctacttccccatttcaggtgtgagatgtaacccaccttgaccataaattggcttttcatagtgctcagatgtttcataattcttcccccaaaataatgaagtttgcagtttaacaactttttttttgagagggggggtctggctctgtagcgcaggctggagtgcagcggtgccatcttgactcattgcagcctccgcctgccaggattcaagcaattctcctgcctcaggctcccgagtagctgggattacagacacccaccacgacgcccgactaatttttgtatttttagtagaggagacggggtttctccatgttggccaggctggtctcaaactgacctcaagtgatctgcccacctcggcctcccaaagtaaaaagtactagaattataggcatgagccattgcgcccag

SEQ ID NO: 13646 - DNA, 19748 bp, Homo sapiens
agaacctggggctgcggtggacctgatcctgaggtctcagcgtagagatgctgagtccagaggcctgttctagttcaccagtgcagtgaggggctcagtatccgggcctcccgagaggtgggtaggaaggcggggtacaggaaacttggcaccaacgcgccgggaccccaccgcggtgcggacagccaggtgtccgtggtggcgcttccttggagatgctgcctgcagacaggcgtggggaatctgaagtttgtgttaatagctaaacgaagttgagttgcagggagcgggggacgctgggaagaaatgattgatttaaaaggaatttgacgccgggcatggtggcggcatgcccccatgttccctggaggtcaagcctgcagtgagccgagatcgcacccgtaccacgacactccgtcccgggcgacagagcgagaccctgtcacgggggaaaaaataaaaataaaaatttgacgctcactttagctgagtattgagccttgttataacattgagatagaggtctggcgcggcgtctcacacctgtaatcccagaactttggaaggccgatgcgggaggatcgcttgaggccaggagttctacgccagcctggctaacatagcgaaaccccgtctctactaaaaatacaaaactaggcaggcctggtggcgggcgcctgtaatccccgctactcgggaggcggaggcatgagaatcgcttgaacccagtaggcaggtgtgccggtaagccgacatcgcaccactgcactccagcctgggggacagagcgagaatccatccaaaaaaaaaaaagttataattcacgtacaattaaattcactcccttttttaaaaaaaagtggagacatagtctcgctctgttgcccaggctggagtacagtggcgccgtctcggctcactgcaacgtccgcctcctgggttcaagcgattctttgcttcagcctctcaagtagctggaattacaggcgcataccaccacacccagctactttgtatttttcaccatgttggttaggctggtctcgaactcctcgcccttccaaagttcagggattacaggtgtgagccaccacacccagtctaaattcacccttttaaagtgtgcaattcagtggttttaatatattcacaaggttgtgcaatcaccactattatctaattccagaacatttttatcatccctaaaagaaaccttaaaaccattagcagacacccattatttcctcctactcccagcagcactaatctatgaatttacccattctcagtactgtattatacaatatttgttcttttgtgtttggtttatttcacttcatgattcaaagtccatctatgttgtatgtagcatgtatcaacttcattttttaaataactgaattatttattgtgtggatataccacattttgtttctccatttttgatggatactggtgattttctaggctttctaggtctagtcctccacagaactcgcagtctgaggcacagacatttaaaacttaagtttttggaaactagcatttaactcttgggttgggtcaggtaattcagtggcctcaggtctggtatcgtttagggcagttttttttttgttttttttttttttttgagatgaagtttcactcttgttgcccagggtggagtgcaatggcgtatctgggctcactgcaacctcacctcctgggttcaagcgcttctcctatctcagcctcctcggtaactgggcttacaggcgcatgccactatgcccggctaatttttggtatttttagtagagacagggtttcaccatgttggccatgctggtctcgaactcctgacctcaggtgatccacccatctcggcctcccaaagtgctgggattacaggtgtgagccaccgcgcctgggtgggagttttgtttttttgtttgtctgttgttttttggggggacagagtttctctcagcctcctcggtaactgggcttacaggcgcatgccactatgccaggctaatttttggtatttttagtagagacagggtttcaccgtgttggcaatgctggtctcaaactcctgacctcaggtgatccacccgcctcggcctcccaaagtgctgggattacaggtgtgagccaccacacctgggcgggagttttgtttttttgtttgtctgttgtttttttggggggacagagtttcgctcttgttgcccaggctggactgcagtggcgagatcttgactcactgccacttctgcctcctggattcaagcgattctcctgcctcagcctcccgagtagctgggattacaggtgtgcaccaccacacccggctaattttgtatttttagtagagaaggggtttctccatgttggttacgctggtctcgaactccctacctcaggtgatcctcccgccttggcctcccaaagtgttgggattacaggcgtgagccactgcgcccctctgggagtgttttttaaagtgttctattctcagttcaccacttaccaggccgttaattatcgtggtatcaagcagagaaatgtttgtgtgctggtcttctcagggaggcagaaaccgtcagagattgctgttgtgtaatgtacaccaaaacgtgttatcttgtagtataaacggtgtagttggagatgagtgtatgaaaaatgtaactgagctagctgtgggagagactagttgtgaaaaattttgagtcacccactgtatgctttcccagctatgttcaaataaggtgacactctgccttcctgtttcagctctaaaactgttcataagtgttattttggctgtatacgtagtgccatgtttttttgtatttttgtgcttttggtgattttgctgtttataggggcctccaagaatagaagtgctgtctagcatttccaagttgaaggctgtgatatatcttatagagaaaagataagcttttagattagctttgttcaggcatcacttttgttgttggctgtgagttcatgttactgcatcaacaatatatattaaataagatatctttaaacagaagcacacataaaacaaggttatgtattggcctgttgagtaaccctgtatttcccctgggagcagtggctcagtatttgctagttcagtgttcatgatggctttacaggacataactaccctgaataatgagaactgactgtctcagtagtgcttcaagggcagaaagcctagtggatatttttccatctctgcagcttttagcatttcttcactcaaggcactcatttttaatattgaactggcagttttgatgtggagagaagctaaaataaggctaaaatgctcttcatactatgtgctgagtggggactgtgctgagtgttggggattcagtgattagtgtatggccccgcagttctctaatggctgagtgtgggagtgcagagaaatgatcagtgtgagggaattaatcctatgttcccaccgtgtttttttgttttttttgagacggagtttcactcttgtcgcccaggctggagtgcggtggcgtgatctcggctcactgcaacctccgtctcccaggttcaagcgattctcctgcctcaacctcccgagtagctgggattacaggtacccgccaccgtgcccagctaatttttgtatttttagtagagacggagtttcaccatgttggccgggctggtctcgaactcctgacctcatgatctgcctgcctcggcctcccaaagtgctgggattactgggttcccacaaattttaagacttacttcaggccaggtgtggtggcttatgcctgtaatcccagcattttgggaggccgaggtgggcagatcacctgaggtcaggagttcgagaccagcctggccaacatggtgaaacccctgcctctactaaaagtacagaaaattagctgggtgtggtcgcgcatgcctgtagttccagctactcaggaggctgaggcaccagaatcacttgaacctgggaggtggaggttgcagtgagctgagattgcgccactgtactccagcctgggcaacagagtgtctccccctcaaaaaaaaaaagacatacttcagagtgtggtgagctgcataaggctttagaggtaatgacattttgagatttcaattaaaaattttttttctactttttttttttgagacagagtctcactcttgctcaggctagagtgcagtggtgcgatcttggctcactgcaaccttcgcctcctggattcaagcgattcttgtgccttagcctcctgaggagctgagattacaggcacctgccaccatgcccagctaatttttgtatctttagtagagaagaggtttcatcatgttagccgggctggtcttgaactcctgacctcaggtgatctgtctgcattggccttccaaagtgctgagattacagatgtgagccaccgtgcctggccactttttttctacttttgctaatttttttaaagtttcatgaacattatagtactgtgttcataaatgaaaataaaagaaacttgctccagtcttgttcatcaagccgttcttgaccttcacagtcagaatctcacccatcaccttgtcacatctccctcttgatctgtatatccagagtccacctgacatgcttcttcagccctccacatataataagaaatggttttgtgagccgagattgtgccattgcactgcagcttgggcaacagtgtgagactcctcaaaaaaaaaaaaaaagaaagaaaaatgcttttaggtgataaggaaatggagaagaataaaacatctttgccagtctttacctttttaatatcttgaattcatgatttcttgccatagccactatcctagtccaggctctctcccttctacccctgagttttttttttttttttttttaccatgtttttatttcctctgggaaaacacctatcagaattttgggatcatatgacagatacatatttaatttctttctttcttttttgagacagggtcttcctctgttgcccaggctggagtgtagtggtatgatcatggctcactgcagccttgaccccttcctcgcccccgctcaagtgatcctcccaccacagcttcctgagtagctgggactgccggcatgctccaccatgcccgactaacgttttgctgcttgtagagacagccatgttccctaggcttgtcttgaactcctgagcctcaagcgatccttccacttcagcctcaagtgctgggattacaggcgtgagccaccactcctggctacttaatttctttctttctttttttttgagacagtctcgttctgtcacccaggctggagtgcagtggggtgatctcttctcactgcagcctctaccttccaggctgaagcaagccttccacctcagccccctgagtagctaggactacgggaacattccaccaggcccagctaatttttgtattttttgtagagatggagtttcatgatgttggccaggctggtcttgaactcctcacctcatgcaatccgcctgcctcagcctcccaaagtgctgggattacaggtgtgagcaactgcacccagcgggccccgcccagacctattttcaaaattagaaaaccgtgaggcttctggaagaagatgagaagaatatcttcatgacctgagtgtgtgcaaaggtttcttagggctcaggatgccagagtcacttaaaaaagcaaaaaaaacccaaaaaaaaaaccacacacacaaagataaatatgattgattacatcaaaatgtaatcacagactactctaagaaaatgaatggggaaacacagggacctatttgacaaaagactgatattcaagataaataaagaactaataggccaggcgcggtggctcacgtctgtaatcctggcactttgggaggccgaggcggggggatcacttgagctcaggagttcgagaccagcctgagcaatatagtgaaaccccatctctactaaaaatacaagaattagaattagctgggcgtgatggcacgtgcctgtagtcccagttactcgggaggctgaggctggagaattgcttcagtcaggaagatggaggttgcagtgagccgagattgtgccactgcactccagcctgggcgactgaacaagacttcgtctcaaaaaaccagtagggctccaggcctgggattgggcctctgctgctctactccctggacgtgtggctccgtccttggagtcggcctttggttttcatgaagagtagtgtgcattaacagctgagtggttttatcagcctgtttcctgccaacagtgtatgagagttccagttgctttacatccttgccagcatttggtgttgtcagtcttttgagttattctgatgggtgtggtgtgtcatggtcttaattttagtcctcagtcactaatggtgtttagcactttttcctgtgcccatgacaatgtgcatcttcctttgtgaagtgcctgctcaaatcttttgcccattttacattgggttgtgtgtctttttattattgagttgtagcagttatttatataacctttatatcctggttacctgtcctctgtctggttgcctattcattttcttagagttgtctgatgaacagaagttttacattttgatgtaatcagttttctcttatattttcttttatagttactgctttctgagtcctaggaaatcttggctaccttcaggctgtgaagataatctttcatgttttcttctgtaagttttttttttttttgagacagagtcttgctctgtcgtccaggctggagtgcggtgatggcgatctccgctcactgcaacctctgcctcccaggttcaagcgattctcctgccccagcctcccgagtagctgggattacagacatgcgccaccatgcccaactaatttttgtatttttattagagacagggtttcaccaggttggccaggttggtcttgaactcttgaccttgtgatccacccgcctcggtctcccaacatgctgggattataggcgtgagccaccgtgcccggcctataaattttatagttttagttttatgtttaagcctatcacccatttctagtttaggtgaatggtgtgagatataattaaatattaatttcttttccatatagatatccagtcattccagcaccatttgttgaaaatgctattgtattgcgttttggaaattaagatgactgtacaaatggtaattgatgtctgcactcccttttctgttccattgttcaatccttgtgttagtaccacacttttaattactgtagctttttagtaagtcttgaagtcatgtagttgtaggtcttccaattttgttgttttcaagcttgatgtgaatattctaaatcctctgcatttccatataaatatcagaattatctttaccagttttacagaaaagtctggtaaagttgtgattgggattgcattgaatctatggatcaatttggaaagaaatgacacctaaacagtattgagtcttcaaatatatgaacttggtgcattttccttcttatttaagccttttaaaatttctttttaggccgggtgcagtggcttatgcctgtaatcccagcactttgggagtctgcagcgggcagatcagctgaggtcaggagttcgagaccagcctggccaacatggtgaaaccccgtctctactaaaaatacaaaaattagccaggtgtggtggcaggtgcctgtagtctcagctacttgggaggctgaggcaggagaactgcttgaacttgctcaggaggtggaggttgcagtgagctgagatagtgccattgcactccagcctgggcaacaagagcaaaactctgtctcaaaaaataataataataaaaataaaaattttgggccaggtgtggcggctcacacctgtaatcccagcaatttgggaggctgagccgggtggatcacctgaggtcaggagtttgagaccagcctgaccaacatggagaaaccctgtctctacgaaaaatacaaaatttgccaggcatggtggcgcatgcctgtaatcccagctactctggaggctgaggcaggagaatcacttgaacctgggaggcagaggttgcagtgagccgagatggtgccattgcactccagcctgggcaacaagagtgaaactctgtctcaaaaaaaaaaaattcttttagttctgttttatggttttcagttcagaagtcttatacatattttgttaaattgatttctagatatgtttcttacctttattgtaaaatggagccatcatttgcatcattcattactctgtatgtaatgtgttatcattctctacctgctttcaagattttctctttatttttgttttttagcagtttgtctgtggtgtatctaggtgtcattttatttgtatttatccggagatttattcttgagatttgcagagcttcttaaatctgtaaatttatgtctgtcggccaatttgggaaatttggagctattagttttaaaaatatttcttctgttccattctctttcacttcttctgtatgtgagttcaatttcacttcaattgtatgtgagttagacattttgatattagcccacaggatcctgaggttctttcattcttttcaatcttttttttttctcgaagtttgcatttcgtgagcaggagtgacagtcattcaggatgatttttgagattcctagttcaagagtagttcctattcttttctaggtgtagtcaagtatggcttctaattctactagaaggcttttttgtcggggaggtggttctatgtcctttggctcttacattttctttgtgtctttcacagcacagttttcagagggtaccctttctctttggttttgttttgttttgttttgttttagacggagtcttgctctgtctccaggctggagtgcagtggcgcaatcttggctcactgcaacctctgctcactgctacctctgcctcccgggttcaagcaattctcctgcctcagcttcctgagtagctgggactacaggcacgcgccaccacacccaactaatttttgtatttttagtagagactgggtttcatcatgttggcaaggctgttctccatctcttgacctcgtgatccgcccgccttggcctcccaaagtgctaggattacaggcgtgagccaccgcgcccggccaacagagggtaccctttcattctttttctccttcttcccagaaggcttgcgttttcaagactacctcatcaagttctgcatgtgtttaaaagtgtctctacccgaccttcccttcctccctcccgatttaacggaattctttgttggtgttttcatacttaccgtgagttttctttttcagggtgatattttagttccatcttaggctctccattgtcctcttctctcttctttttttttttgagacagagtctcattctgtcacccaggctggagtgcagtggtgtgatctctgctcactgcaacctctgcctcccaggttcaagtgattctcctgcctcagcctcccgaatagctgggattacaggcgcacacaaccacgcccacctaatttttgtattttcagtagagacggggtttcaccatcttggccaggctggtctcaaactcctgacctcgtgatccgcctgcctcagcttcccagagtgctgggattacaggcatgagccaccgcgcccggtgcgcccagccctcttctctcttctttgcatctctcttcctatctggatccctctttgctgtccttaaagagctgagatgagagattgagaaacatctctacaagaaattgacgtttttctacttatgggtaattagaagcttgtagtattttcagtcttctaagtatgttgaagatatgagacgttggtgattttctttgtttctccggttggttggtctgtgtagtttttggacatgtgtttggatatttggatttatatagctgccataatcttggctatgcaggtagtctttcctgacacttcatcctgaaagatttgaagcctttggacaaattttacagtgggctgggtgcagtggctcacgtctgtaatcccagtgctttgggaggctgggcaggaagattgcttgagcccaggagtttgagaccagcctggacaacatagtgagacccgtgtctctacaaaaaataaaaaatatgccgtgtgtggcgttatacaactgtagtcccagctacttaggaggctgaggtgggaagatcacgagccaaggagtttgagggtacggtgagccatgatcgcctcactgcactgggtggcacagcgagactgtctcaaaaaaaaaatttacaattaatgtctgcatatccttcacctaggttcataaatttgtacttttgctttatctacttgcctttttctctctctctacacacacacacacacacacacacacacacacaattagttgaatgaattgagagtaagttgcagaaaacatgacactttactccaatattgcatcatacaaaatcatacatctagtgataggccattgtcctacagaatcacgatataattatcacactaaccagctgtggtggtgcacacctgtagtctaagctactcgggaggctgaggcagaaggatcacctgagcccaggaggttgtggctgcagtctcatattcatcccatcatcagatttctcccattgtcctaataatattctttatagcttttctttatccctgatccgaaatttcattgaagatcacacagtgcatttagttgtcatgcctcttaagtctttatttatttattatttattttttgagatggagtcttgctctgttacccaaactggagtgcagtggcatgatcttggctcatgcaacctccacccgctgggttcaagtgattatcctgcttcagcctcccgtgttgctgggactacaggtgtgtgccaccatgcccagctactttttatatttttagtagagacgggaattgtaccatgttggccaggctggtcttgaactcctgagctcagatgatccacccgccttggcctcccaaagtgctgggattacaggcgtgggccaccacacccagccttaagcctcttttaacataaaagagttcaccagccattctattttgttttgctttttgagacactgatgctttggagagtccaggccagttgctttgtagatttcaacttgtttgattgtttcctgatgattaggttggtagaaatactacctcaatgatgggaccttcttagtgcgtccatcaggaagcacatgatgtgactgtaattggtgacattaagtttgattccttaataattaaggtggtaactcccaggtttctacattgtaaaggcatcttttgccgccctcctttttattcccaagtagtttatttggagattagtcctttacacagtagaggagcggggaagggagacaggaaaggaaagtttgacaacaaagggtgagttttcaagcctgttgccacgggggaacctaattccactggagaagctcatggcttggtgatgttccacagaggggtcagaaatttagcgtatttcaacaccagctcctgtcaggcaccatttgagggctgctgccagggtggttcaattttctggtgcttacagcttgccataaacaggtgcaaagtagtctggataccaaagaaagctctcaggtaacaagatgcagatgttggcatttggaagtcagaatagggtgcactattgtggtaagagctgaagggatggctgggcgcggtggctcacacctgtagtcccagcactttgggaggatgaggcaggcggatcacctgaggtcagaagttcgagagcagcctggccaacatgacgaaaccccgtctctactaaaaatacaaaaattagccaggcgtggtggtggatgcctgtaatcccagctattcagtaggctgaggcaggagaattgcttgaatctgggaggtgtaggttgcagtgagctgagatcacaccactctgcactccagcctgggtgacagagcgagactctgtctcagaaaaaaaaaaaagctgaagggatgctgagtagagcatccgtagtgtctgctatacctgggtaccctagaacctggagaacctacagcttgaggcaagagcgtatgtgctattattttttcaagaagtgtgctctcaggaagcagaggtaggggaaaggtgagtgaagggagaaggaagattaagtcagttcaagggtgcattttgaagttggttgcccttggtgcaagtacagttggttgcttgttctcctaaagctgtctcccaggaggatgtatacataactgcattccagggcaatccatctaaaggaagggtggacggacccctcagcttctgtatctcactggaaaaaggtttgcttcatggcacattaattcccatagacttctaggttgtgcatgtgtgggtaccaggtgggtcccacagacccttacacctccaaggcaagcagcaagccacgggtgggaagtgataggtacccagtatgagcaggaggtaagggaccgtggggttgtgcctgtgggcagttggttataacccagacgtgtttgatcagcccagtgacagctggagtggacaaagtgaccaagggcctcaaggacacacaaggccaagaagatttgaagtgctgtgtaagatatgcctaatgcatttggattctacctttgtttaacgaatatgcacacataaaaaacacttgaactccttgagcccaggagttcaagaccaacctgggcaacatagtgagacactcatctctaaaaaaattttaaaaaaaattaacctggcatgatagcactcacctgtagtcctgtctactctggaggccgcagtgggaggatcacctgagccctggaggtcaaggttacagtatgctatgattgcaccactgcattccagcctgggtaacagagcaagacgctgtctcttaaattttttttttttttttttttacttttataatggaaaaaccattgtagacagttttaggaaggaaagcagaatagtaagacatctttttcaaagtaaaagagcaaaaaaggcaaaaaatatttcacatttactttatggacaaagataagattgtccttcaataaaagactgaattttttttgtttgttttgttttgttttttgagaaagagtcttgctccattgcccaggctggaatgcagtggtgtggtctcggctcactgcaacctccgcctcccgggtacaagcaattctccagcctcagccccccgagtagctgggactacaggcacgcgccactgcatctggctaagttttgtatttttagtagagatggggtttcaccatgttgaccaggctcgtcttgaactcctgacctcaggttatccacctgcctgggcctcccaaagtgctgggattacaagtgtgagccaccgtgcccggccacaagttgctctttaaatgtgagaagtgttctggcatggtggctcacacctgaggcgggtggatcacttgaggtcaggagttcgagatcaggctggccaacatggtgaaaccccgtctctagttatttatttatttatttatttatttatttatttatttatttttttgagacggagtttcactcttgtttcccaggcgggagtgcaatggcgcaatctcggctcactgcaacctccgccttccgggttcaagcgattctcttgcctcagcctcctgagtagctgggattacaggcatgcaccaccacacccggctaattttgtatttttagtagagacggggtttttccatgttggtcaggctggtctcgaattcctgacctcaggtgatctgccctcctcagcctcccgaagtgttgggattacaggcgtgagccaccacgcccggccctgtctctactaaaaatgcaaaatttagccgggcatggtggcgcacacctgtaatctcagctactcaggagactgaagcagcagattcgcttgaacccaggaggtgaaggttgcagtgagctgagaccacaccactgcagggcagcctaggcgacaagagcgaaacgcttacaaaaaaaaaaaaaaaaaaagattcacaggtgatggtgatgctgctggttaaggaagtgaagtggctttttgctctgtagccttcctgaatgttggggcctcctgctcttcatttgtttcatttctattaagtctcctccctccagctatcttgttagctcctggaaagcatttcagtgattgtggcttctatttctttttgaccccacagtgtccagggtcatgctgcctatatagtagtgagcagtaagttgaggtttttaaaaactttattattattatttttgagatggagtcttgttctgtcacccaggctggagtgcagtggcacaatctcagttcactgcaacctctgcctcccaagttcaagtgattctcctgcctcagcctcccgagtagctgggactacaggcgcctgccaccacatccggctaatttttttgtatttttagtacagatggggtttcactatgttggtcaggctgatctcgaactcctgacctcaggtgatccgcctgctttggcctcccaaagtgttagggttacaggtgtgagccaccacacctggccggtttttttaaactttaaaacagattcacttgatttttcttccctaccccccagcttttttgaggtatgactgacaaaaattgtatatatttagggtgtacaatgtgatgatttgatatgtgaatgcactgtgaaatgattaccacagtcaaggtaattcacatatccaccacctcccagttaccctcttagctagtacaggttgggtattgcttctctgaaatgctttgggaccagaagtgttttggacttcagattttggaatatttgaatatatataatcagatatcttgggaaggggacccaagtctaaacatgaaattcatttgttttcagagcctaaagatgatttttttttttttttttttttgagatggagtctcactctcgcccaggctggagtgccgtggcacaatctcagctcactgcaacctctgcctcccaggttcaagcgattctcctacctcagcctcccaagtagctggaattacaggctcgcactaccacacccggctaatttttgtatttttataaagacatttcaccatgttggccaggctggtctcaaactcctgacctcaggtgatccgcccgcctcagcctcccaaagtgctgggattataggtgtcagtgactgcgtctggctgataattgaatttttctcttggagaagctgaataaactgtgtgttgtgtgcctgcctttttttttgtttttttttttttttgagacagagtcagacactctgtcacccaggctggagtgcgatggggtggtcatagctcactgcagcctcaaactcctgagctcaagcgatcctcccacatcagcctcctaagtagcatagcaccacgcctggctaatttttaaattttttgtagtgatggggttttgttgtctaggctagtctcaaactcctgggctcaagcagtccttctgccttggcctcccaaggtggtaggattataggtttgagccaccatgcctggccattacctgtgttttgactataacacatcatgttggcactcaaaacgttttggattttggagcattttgaattttggatttttggattagcaatgttccacctatagtacattttttgtttgctttcccataaagaattttttgtaattttgattttatagttctaaatgtaatatattcttattgtaaaaatcacctttaatagcaccgccagaatagcaaacatgttaacagaaaggtagaagtagaccttaaagaatcttcagcagcttgagagaccacagctaaccactgaggaactctgttctggattggagcagtgcttagaagcttataaataactcttagggtattgcatagggattctttttttttttttttcctgaaatggagtctcgctctgtcgcccaggctggagtgcagggtgtgatctcagatcactgcaacctccgcctcctgggttcaagcaattctttgcctcagcctcccgagtagctgggattacaggcgcctgccaccatgcccagctaatttttttggatttttagtagagagggggtttcaccatgttagccaggatggtctccatctcctgaccttgtgatccacccacctcggcctcccaaagtgctgggattacaggcatgagccactgtgcctggccgcataaggattctttatgtgatttttcagtagaggctcttgccttttactttaaacattctttgagggttgttttttttttccgctttttatttatatagaggtcaaccagaatcaagatgtctgggactgaggaagcaattcttggaggacgtgacagccatcctgctgctggcggcggctcagtgttatgctttggacaggtaactgtggttccttcatgccgggaaagaatgaggtgaagtgagtaaagttagggcaaggcagtttgtagagcatcgtagtacatgtgtgagcagtacctagtacgtttacctagtacgtgtgtgagcagtacctagtacgtttacctagtacgtgtgtgagcagtacctagtacgttgacgcggtgcgtgcgggggcagtacctagtacgtttacatagtacatgtgtgagctatttgttattggtttttcctttagatgcattttttgggagtcttgtgaactctggagggcattttggaatgttagctatcaaaagactgatagtactggggattagatttagattttaaattttttgtggggggggatagataacatatttgtatgacatcaaattcaaaatgaaactgtgaaaatctccctatttcctattgcccctgtgtgcatgccacccagttctatttcttttttttttcgagactgagtcttgctttgtcacccaggctgcagtgcagtggtgcgatctcagctcactgcaacttccaccctctggattcaagcaattctcctgcctcagcctcccaagtagctgggataacaggcatgcaccaccatggccagctaatttttatatttttagtagagatggggtttaaccatgttggccaggctggtctcgaactcctgacctcaggtgatccgcctgcctcggcctcccaaagtgtttggattacaggcgtgagccaccacgcccgggcttaatttttttgtatttttagtagagatgtggtttcaccatgttggccagggtagtcttgaactcctgacctcgtgatctgcctgcctcggcctcctaaatgctggaattacaggcatgagccaccgcgcctggctccagttgtctttcttggaggcatggaaagttactgggggtcctattccttgtagggacattgtgtgcacagaaaagagtttcttgctttgtccacccaaactccatctttgtctttagcagagagttgtgagtattcatctcatctgagcagggcaagggggacaaaacccaaatcagcaagcagtagtgtgtttctgtttgtgcaggatgggaaattgttgtattggagaaggcgtcaatctctggaaaggacaaatggaagcaaggcttcctacccccgtgctctttccgtacttgcttcctgtgctgacgtcatttacagatctggaggcagaacattttagcttcctaagcttcagaaacatttataaggatggtagcagcagctaaggcagcagttctcaaaatgcagttctcaaaaaccctggggtttctgaagatctttcagagtccagaaggtcaaaattatcttcataataatactatttgcctctttcacactcattgtctcatgagtgaatggtagagttttcagagagtgcatgatatgtggtgatgtcactgctatgatgcctaatggcatgcatgccttaaaagtttctcagttttgattcctaataggatacatagaacccacataaacaaaggttctggggggtctttttaagagtataaagtctccataaaggatggagactcaatgatgtgaggaatggtggaagtgtgaatttaattttcttttttggggttgcagtgccagtacacagcagaagagtaccaggccatccagaaggccctgaggcagaggctgggcccagaatacataagtagccgcatggctggcggaggccagaaggtaggagaattcatgtgcctggaaagcaggcatccataccgcagactccgatggtcttgccagttccctctctgggtcctcagggattcggaagtctgctgttaactgttcctggaggtctcccagtgcccctgggaggggatgggttccagacttcattctcatccgaaggggcctgggcatggtcttgacactcgcataaccgccgtcttaagatttttacatcatctttttttttttttatttttaaagacagggtcttgctctgtcacctaggctggagtccgaccagtggtgtcatctcagctcactgcagcctccacctcccaggctcaagcgatcctcctgcctcagcttcctgactagctgggactacaggcacacgccaccacacctggttaattttttaatgttctgtagagacgacatctcgccatgttgcccaggctgatctcgaactgctgggctcaagtgatcctcccacctcggcctcccaaagtgctgggattacaggtgtgggccaccatgcccagcctttacaccattaaaaaaaaaatgttccttttgccatttgctttttttttttaattaaacactttttaaagaacttatgattgacacataataattgcatatcatttgcttctaattttaacttctgtgtatatttttggtcttccataaaatatgtcaaacagatttgtactttttgcaaactgaattttagcaactgctgggtgagttcctcctcccaacagaccattcgttctcgcgggctccatctagaagatttttgaaataaattcattgagaattttcttgaaaaaaaaattttttttaacagactggttctcactctgtcacttaggctggagtgcagtggcacgatcctagcttactgcagccttgagctcctgggctcaagtgatcctcccacctcagcctcccgagaagaatgtttaaggacagtttatcgaaaaaagtagatgaggaataaattatgtcaattttgattcacatttaagtgtggtaaggaattaacacagcttttccttaaaaacatttgtttttctaggtgtgctacattgagggtcatcgggtaattaatctggccaatgagatgtttggttacaatggctgggcacactccatcacgcagcagaatgtgggtgagtatgctctccagcagtggggacttctgcactgtccagctcctgctgaaagtctgctgtgggtgaggaggtaaggtaggtggactcagctgccagcaggaggaatggttgtggcccagcggtcagtgtcctcttcaacttgctctctttcccactcctagattttgttgacctcaacaatggcaagttctacgtgggagtctgtgcatttgtgagggtccagctgaaggtgaggggatggagtagacctgctgcccggaaggatcagtgggtggt

SEQ ID NO: 13647 - DNA, 530 bp, Homo sapiens
agaacctggggctgcggtggacctgatcctgaggtctcagcgtagagatgctgagtccagaggcctgttctagttcaccagtgcagtgaggggctcagtatccgggcctcccgagagaggtcaaccagaatcaagatgtctgggactgaggaagcaattcttggaggacgtgacagccatcctgctgctggcggcggctcagtgttatgctttggacagtgccagtacacagcagaagagtaccaggccatccagaaggccctgaggcagaggctgggcccagaatacataagtagccgcatggctggcggaggccagaaggtgtgctacattgagggtcatcgggtaattaatctggccaatgagatgtttggttacaatggctgggcacactccatcacgcagcagaatgtggattttgttgacctcaacaatggcaagttctacgtgggagtctgtgcatttgtgagggtccagctgaaggtgaggggatggagtagacctgctgcccggaaggatcagtgggtggt

SEQ ID NO: 13648 - DNA, 2366 bp, Homo sapiens
gttccctcccaggatcgacatgcacttggatcattgcagtttctgggcctgctgtcatctcccccttcagtacttcccacatatgactaccaactgttagacgatgtgctgctgccagaccagcctttcatttcttggacatccggctatttacccaggaaaagtcatcctttgactatttttcatgacctttctcatctgactcgtgatctgcccatcttgttactccctagcagtgtggtaagaggtcaaccagaatcaagatgtctgggactgaggaagcaattcttggaggacgtgacagccatcctgctgctggcggcggctcagtgttatgctttggacagtgccagtacacagcagaagagtaccaggccatccagaaggccctgaggcagaggctgggcccagaatacataagtagccgcatggctggcggaggccagaaggtgtgctacattgagggtcatcgggtaattaatctggccaatgagatgtttggttacaatggctgggcacactccatcacgcagcagaatgtggattttgttgacctcaacaatggcaagttctacgtgggagtctgtgcatttgtgagggtccagctgaaggatggttcatatcatgaagatgttggttatggtgttagtgagggcctcaagtccaaggctttatctttggagaaggcaaggaaggaggcggtgacagacgggctgaagcgagccctcaggagttttgggaatgcacttggaaactgtattctggacaaagactacctgagatcactaaataagcttccacgccagttgcctcttgaagtggatttaactaaagcgaagagacaagatcttgaaccgtctgtggaggaggcaagatacaacagctgccgaccgaacatggccctgggacacccacagctgcagcaggtgacctccccttccagacccagccatgctgtgataccggcggaccaggactgcagctcccgaagcctgagctcatccgccgtggagagcgaggccacgcaccagcggaagctccggcagaagcagctgcagcagcagttccgggagcggatggagaagcagcaggttcgagtctccacgccgtcagctgagaagagtgaggcagcgcctccggcccctcctgtgacgcacagcactcctgtaactgtctcagaaccactcctggagaaagacttccttgcaggagtgactcaagaattaatcaagactcttgaagacaactctgaaaagtgggctgtgactcccgatgcaggggatggtgtggtcaagccctcgtctagagcagacccagcccagacctctgacacattagccttgaacaaccagatggtgacccagaacaggactccacacagcgtttgccaccagaaaccacaagcaaaatctggatcttgggacctccaaacttatagcgctgaccaacgcacaacaggaaactgggaatctcataggaagagccaggacatgaagaaaaggaaatatgatccatcttaactgaggctcaggccacataattggactctgtcacaaagggactttggaaaactactttttggtcatgaaattgttcatcgctgctggagaatgaacgtcattgcgatttatcttgcttcattctgaaccttatcaagaggatctgactgagagcccactgcagttagagctgagcacttttgaaaagcttgtccatcactctagtagggagaggctctggacagatgaataccttttcttcggcttgtgaggcttcccactatttattactgaactattatgttaatgaagatggacattttaggaatcaccaatggctccttgccctcaagcaatataggccagacttggtcctaagcacctgcctcagcaattgtctacattcagttgttttgcataacgtctgccttctttcctttacggtccatgcctttaatgttgcccacattaagcactgtggatcacgacaggaaaaaggttggagcagtgcttttcactactttgtatcaatccaggctacaatcttcatttaatataaataatttatggatttatgacattacaatcctgcattgtttcaagactgacattttttcctaaggaaggaaataatcatctaagaccacgaaaaaaggctgttttttgtttttttttttttttttttttttgagacggggtctggctgtgttgccctgactggagttcagtggtgcaaacacagctctctccacaacctcttgggcccaagtgatactcccacctctgccttacaaaatacagggattactggtgtgagccactgtgtctggccagaaaaggcatttttgagaaagcaaatcgtatacc

SEQ ID NO: 13649 - DNA, 1531 bp, Homo sapiens
tctcttccccttgtccatagcctagatcgagctccctgtgtgcaccgcgcgctgcccgagaggtcaaccagaatcaagatgtctgggactgaggaagcaattcttggaggacgtgacagccatcctgctgctggcggcggctcagtgttatgctttggacagtgccagtacacagcagaagagtaccaggccatccagaaggccctgaggcagaggctgggcccagaatacataagtagccgcatggctggcggaggccagaaggtgtgctacattgagggtcatcgggtaattaatctggccaatgagatgtttggttacaatggctgggcacactccatcacgcagcagaatgtggattttgttgacctcaacaatggcaagttctacgtgggagtctgtgcatttgtgagggtccagctgaaggtgaggggatggagtagacctgctgcccggaaggatcagtgggtggtaggagaaggatggttcatatcatgaagatgttggttatggtgttagtgagggcctcaagtccaaggctttatctttggagaaggcaaggaaggaggcggtgacagacgggctgaagcgagccctcaggcttcccttgctgggagtaagtggtagaatcctgtactctctcttctccgtgcactcagtcatgtgtgccggaggccttcccactcctactgcgagtgcacagacagcaccctcctctccgtgctcctcagcagtcctccgctacgcacaggagttttgggaatgcacttggaaactgtattctggacaaagactacctgagatcactaaataagcttccacgccagttgcctcttgaagtggatttaactaaagcgaagagacaagatcttgaaccgtctgtggaggaggcaagatacaacagctgccgaccgaacatggccctgggacacccacagctgcagcaggtgacctccccttccagacccagccatgctgtgataccggcggaccaggactgcagctcccgcagccgcggctgttgctcaggagcccgtcctcgccgccgccctctcatgcagaagcctgagctcatccgccgtggagagcgaggccacgcaccagcggaagctccggcagaagcagctgcagcagcagttccgggagcggatggagaagcagcaggttcgagtctccacgccgtcagctgagaagagtgaggcagcgcctccggcccctcctgtgacgcacagcactcctgtaactgtctcagaaccactcctggagaaagacttccttgcaggagtgactcaagaattaatcaagactcttgaagacaactctgaaaagtgggctgtgactcccgatgcaggggatggtgtggtcaagccctcgtctagagcagacccagcccagacctctgacacattagccttgaacaaccagatggtgacccagaacaggactccacacagcgtttgccaccagaaaccacaagcaaaatctggatcttgggacctccaaacttatagcgctgaccaacgcacaacag

SEQ ID NO: 13650 - DNA, 1510 bp, Homo sapiens
tctcttccccttgtccatagcctagatcgagctccctgtgtgcaccgcgcgctgcccgaggcgcaggtcaaccagaatcaagatgtctgggactgaggaagcaattcttggaggacgtgacagccatcctgctgctggcggcggctcagtgttatgctttggacagtgccagtacacagcagaagagtaccaggccatccagaaggccctgaggcagaggctgggcccagaatacataagtagccgcatggctggcggaggccagaaggtgtgctacattgagggtcatcgggtaattaatctggccaatgagatgtttggttacaatggctgggcacactccatcacgcagcagaatgtgggtgagtatgctctccagcagtggggacttctgcactgtccagctcctgctgaaagtctgctgtgggtgaggaggtaagattttgttgacctcaacaatggcaagttctacgtgggagtctgtgcatttgtgagggtccagctgaaggatggttcatatcatgaagatgttggttatggtgttagtgagggcctcaagtccaaggctttatctttggagaaggcaaggaaggaggcggtgacagacgggctgaagcgagccctcaggagttttgggaatgcacttggaaactgtattctggacaaagactacctgagatcactaaataagcttccacgccagttgcctcttgaagtggatttaactaaagcgaagagacaagatcttgaaccgtctgtggaggaggcaagatacaacagctgccgaccgaacatggccctgggacacccacagctgcagcaggtgacctccccttccagacccagccatgctgtgataccggcggaccaggactgcagctcccggtatgcggcctaagtcccctcctttcctctgcggcccctcctgtgtcacggggctgcctccactcaggcctccagagccagccagccgtgcgtgtcctcccagcagccgcggctgttgctcaggagcccgtcctcgccgccgccctctcatgcagaagcctgagctcatccgccgtggagagcgaggccacgcaccagcggaagctccggcagaagcagctgcagcagcagttccgggagcggatggagaagcagcaggttcgagtctccacgccgtcagctgagaagagtgaggcagcgcctccggcccctcctgtgacgcacagcactcctgtaactgtctcagaaccactcctggagaaagacttccttgcaggagtgactcaagaattaatcaagactcttgaagacaactctgaaaagtgggctgtgactcccgatgcaggggatggtgtggtcaagccctcgtctagagcagacccagcccagacctctgacacattagccttgaacaaccagatggtgacccagaacaggactccacacagcgtttgccaccagaaaccacaagcaaaatctggatcttgggacctccaaacttatagcgctgaccaacgcacaacag

SEQ ID NO: 13651 - DNA, 2499 bp, Homo sapiens
gatcgagctccctgtgtgcaccgcgcgctgcccgaggcgccccagtgacagctggagtggacaaagtgaccaagggcctcaaggacacacaaggccaagaagatttgaagtgctgtaggtcaaccagaatcaagatgtctgggactgaggaagcaattcttggaggacgtgacagccatcctgctgctggcggcggctcagtgttatgctttggacagtgccagtacacagcagaagagtaccaggccatccagaaggccctgaggcagaggctgggcccagaatacataagtagccgcatggctggcggaggccagaaggtgtgctacattgagggtcatcgggtaattaatctggccaatgagatgtttggttacaatggctgggcacactccatcacgcagcagaatgtggattttgttgacctcaacaatggcaagttctacgtgggagtctgtgcatttgtgagggtccagctgaaggtgaggggatggagtagacctgctgcccggaaggatcagtgggtggtaggagaaggatggttcatatcatgaagatgttggttatggtgttagtgagggcctcaagtccaaggctttatctttggagaaggcaaggaaggaggcggtgacagacgggctgaagcgagccctcaggcttcccttgctgggagtaagtggtagaatcctgtactctctcttctccgtgcactcagtcatgtgtgccggaggccttcccactcctactgcgagtgcacagacagcaccctcctctccgtgctcctcagcagtcctccgctacgcacaggagttttgggaatgcacttggaaactgtattctggacaaagactacctgagatcactaaataagcttccacgccagttgcctcttgaagtggatttaactaaagcgaagagacaagatcttgaaccgtctgtggaggaggcaagatacaacagctgccgaccgaacatggccctgggacacccacagctgcagcaggtgacctccccttccagacccagccatgctgtgataccggcggaccaggactgcagctcccgaagcctgagctcatccgccgtggagagcgaggccacgcaccagcggaagctccggcagaagcagctgcagcagcagttccgggagcggatggagaagcagcaggttcgagtctccacgccgtcagctgagaagagtgaggcagcgcctccggcccctcctgtgacgcacagcactcctgtaactgtctcagaaccactcctggagaaagacttccttgcaggagtgactcaagaattaatcaagactcttgaagacaactctgaaaagtgggctgtgactcccgatgcaggggatggtgtggtcaagccctcgtctagagcagacccagcccagacctctgacacattagccttgaacaaccagatggtgacccagaacaggactccacacagcgtttgccaccagaaaccacaagcaaaatctggatcttgggacctccaaacttatagcgctgaccaacgcacaacaggaaactgggaatctcataggaagagccaggacatgaagaaaaggaaatatgatccatcttaactgaggctcaggccacataattggactctgtcacaaagggactttggaaaactactttttggtcatgaaattgttcatcgctgctggagaatgaacgtcattgcgatttatcttgcttcattctgaaccttatcaagaggatctgactgagagcccactgcagttagagctgagcacttttgaaaagcttgtccatcactctagtagggagaggctctggacagatgaataccttttcttcggcttgtgaggcttcccactatttattactgaactattatgttaatgaagatggacattttaggaatcaccaatggctccttgccctcaagcaatataggccagacttggtcctaagcacctgcctcagcaattgtctacattcagttgttttgcataacgtctgccttctttcctttacggtccatgcctttaatgttgcccacattaagcactgtggatcacgacaggaaaaaggttggagcagtgcttttcactactttgtatcaatccaggctacaatcttcatttaatataaataatttatggatttatgacattacaatcctgcattgtttcaagactgacattttttcctaaggaaggaaataatcatctaagaccacgaaaaaaggctgttttttgtttttttttttttttttttttttgagacggggtctggctgtgttgccctgactggagttcagtggtgcaaacacagctctctccacaacctcttgggcccaagtgatactcccacctctgccttacaaaatacagggattactggtgtgagccactgtgtctggccagaaaaggcatttttgagaaagcaaatcgtataccttattaacaaaatagaatatatatatattgcttatctgaaatgcttgaaaccagaa

SEQ ID NO: 13652 - DNA, 2464 bp, Homo sapiens
gtgcaccgcgcgctgcccgaggcgcaggtcaaccagaatcaagatgtctgggactgaggaagcaattcttggaggacgtgacagccatcctgctgctggcggcggctcagtgttatgctttggacagtgccagtacacagcagaagagtaccaggccatccagaaggccctgaggcagaggctgggcccagaatacataagtagccgcatggctggcggaggccagaaggtgtgctacattgagggtcatcgggtaattaatctggccaatgagatgtttggttacaatggctgggcacactccatcacgcagcagaatgtgggtgagtatgctctccagcagtggggacttctgcactgtccagctcctgctgaaagtctgctgtgggtgaggaggtaaggtaggtggactcagctgccagcaggaggaatggttgtggcccagcggtcagtgtcctcttcaacttgctctctttcccactcctagattttgttgacctcaacaatggcaagttctacgtgggagtctgtgcatttgtgagggtccagctgaaggtgaggggatggagtagacctgctgcccggaaggatcagtgggtggtaggagaaggatggttcatatcatgaagatgttggttatggtgttagtgagggcctcaagtccaaggctttatctttggagaaggcaaggaaggaggcggtgacagacgggctgaagcgagccctcaggagttttgggaatgcacttggaaactgtattctggacaaagactacctgagatcactaaataagcttccacgccagttgcctcttgaagtggatttaactaaagcgaagagacaagatcttgaaccgtctgtggaggaggcaagatacaacagctgccgaccgaacatggccctgggacacccacagctgcagcaggtgacctccccttccagacccagccatgctgtgataccggcggaccaggactgcagctcccgccgcggctgttgctcaggagcccgtcctcgccgccgccctctcatgcagaagcctgagctcatccgccgtggagagcgaggccacgcaccagcggaagctccggcagaagcagctgcagcagcagttccgggagcggatggagaagcagcaggttcgagtctccacgccgtcagctgagaagagtgaggcagcgcctccggcccctcctgtgacgcacagcactcctgtaactgtctcagaaccactcctggagaaagacttccttgcaggagtgactcaagaattaatcaagactcttgaagacaactctgaaaagtgggctgtgactcccgatgcaggggatggtgtggtcaagccctcgtctagagcagacccagcccagacctctgacacattagccttgaacaaccagatggtgacccagaacaggactccacacagcgtttgccaccagaaaccacaagcaaaatctggatcttgggacctccaaacttatagcgctgaccaacgcacaacaggaaactgggaatctcataggaagagccaggacatgaagaaaaggaaatatgatccatcttaactgaggctcaggccacataattggactctgtcacaaagggactttggaaaactactttttggtcatgaaattgttcatcgctgctggagaatgaacgtcattgcgatttatcttgcttcattctgaaccttatcaagaggatctgactgagagcccactgcagttagagctgagcacttttgaaaagcttgtccatcactctagtagggagaggctctggacagatgaataccttttcttcggcttgtgaggcttcccactatttattactgaactattatgttaatgaagatggacattttaggaatcaccaatggctccttgccctcaagcaatataggccagacttggtcctaagcacctgcctcagcaattgtctacattcagttgttttgcataacgtctgccttctttcctttacggtccatgcctttaatgttgcccacattaagcactgtggatcacgacaggaaaaaggttggagcagtgcttttcactactttgtatcaatccaggctacaatcttcatttaatataaataatttatggatttatgacattacaatcctgcattgtttcaagactgacattttttcctaaggaaggaaataatcatctaagaccacgaaaaaaggctgttttttgtttttttttttttttttttttttgagacggggtctggctgtgttgccctgactggagttcagtggtgcaaacacagctctctccacaacctcttgggcccaagtgatactcccacctctgccttacaaaatacagggattactggtgtgagccactgtgtctggccagaaaaggcatttttgagaaagcaaatcgtataccttattaacaaaatagaatatatatatattgcttatctgaaatgcttgaaa

SEQ ID NO: 13653 - DNA, 2413 bp, Homo sapiens
gcggcctccatctaagatctcttccccttgtccatagcctagatcgagctccctgtgtgcaccgcgcgctgcccgaggcgcaggtcaaccagaatcaagatgtctgggactgaggaagcaattcttggaggacgtgacagccatcctgctgctggcggcggctcagtgttatgctttggacagtgccagtacacagcagaagagtaccaggccatccagaaggccctgaggcagaggctgggcccagaatacataagtagccgcatggctggcggaggccagaaggtgtgctacattgagggtcatcgggtaattaatctggccaatgagatgtttggttacaatggctgggcacactccatcacgcagcagaatgtggattttgttgacctcaacaatggcaagttctacgtgggagtctgtgcatttgtgagggtccagctgaaggtgaggggatggagtagacctgctgcccggaaggatcagtgggtggtaggagaaggatggttcatatcatgaagatgttggttatggtgttagtgagggcctcaagtccaaggctttatctttggagaaggcaaggaaggaggcggtgacagacgggctgaagcgagccctcaggtgagcgcggggctgggagtctaacctgcgtcatttcagctcttgcttcagagcagatttcgattttttttggaagaggtaacacatccacatggttcaaaaatccaagcagcgtggaaggtaattctcacccctgccctggttcctgtctgccgttttcccactttcgttagtattttttcaatgtttctgtttcaggcttcccttgctgggagtaagtggtagaatcctgtactctctcttctccgtgcactcagtcatgtgtgccggaggccttcccactcctactgcgagtgcacagacagcaccctcctctccgtgctcctcagcagtcctccgctacgcacaggagttttgggaatgcacttggaaactgtattctggacaaagactacctgagatcactaaataagcttccacgccagttgcctcttgaagtggatttaactaaagcgaagagacaagatcttgaaccgtctgtggaggaggcaagatacaacagctgccgaccgaacatggccctgggacacccacagctgcagcaggtgacctccccttccagacccagccatgctgtgataccggcggaccaggactgcagctcccgaagcctgagctcatccgccgtggagagcgaggccacgcaccagcggaagctccggcagaagcagctgcagcagcagttccgggagcggatggagaagcagcaggttcgagtctccacgccgtcagctgagaagagtgaggcagcgcctccggcccctcctgtgacgcacagcactcctgtaactgtctcagaaccactcctggagaaagacttccttgcaggagtgactcaagaattaatcagtaaataccttgaaatgcttagactcttgaagacaactctgaaaagtgggctgtgactcccgatgcaggggatggtgtggtcaagccctcgtctagagcagacccagcccagacctctgacacattagccttgaacaaccagatggtgacccagaacaggactccacacagcgtttgccaccagaaaccacaagcaaaatctggatcttgggacctccaaacttatagcgctgaccaacgcacaacaggaaactgggaatctcataggaagagccaggacatgaagaaaaggaaatatgatccatcttaactgaggctcaggccacataattggactctgtcacaaagggactttggaaaactactttttggtcatgaaattgttcatcgctgctggagaatgaacgtcattgcgatttatcttgcttcattctgaaccttatcaagaggatctgactgagagcccactgcagttagagctgagcacttttgaaaagcttgtccatcactctagtagggagaggctctggacagatgaataccttttcttcggcttgtgaggcttcccactatttattactgaactattatgttaatgaagatggacattttaggaatcaccaatggctccttgccctcaagcaatataggccagacttggtcctaagcacctgcctcagcaattgtctacattcagttgttttgcataacgtctgccttctttcctttacggtccatgcctttaatgttgcccacattaagcactgtggatcacgacaggaaaaaggttggagcagtgcttttcactactttgtatcaatccaggctacaatcttcatttaatataaataatttatggatttatgacattacaatcctgcattgtttcaagactgacattttttcctaaggaaggaaataatcatctaagaccacgaaaaaa

SEQ ID NO: 13654 - DNA, 3349 bp, Homo sapiens
cctccactcaggcctccagagccagccagccgtgcgtgtcctcccagcagccgcggctgttgctcaggagcccgtcctcgccgccgccctctcatgcagaagcctgagctcatccgccgtggagagcgaggccacgcaccagcggaagctccggcagaagcagctgcagcagcagttccgggagcggatggagaagcagcaggttcgagtctccacgccgtcagctgagaagagtgagggtgagcgaggggtgggagcagggccctgggaggcgtctgcaggaggaagtgtagccgcagggtcttctgattctctgcggtaaccctgggccggctccaaaccaggcctcgctgggacttctctcaagctacacgcaggagagatgagcccaggaaattcagatatttaaatctgctgtacattttcccgtttctaaagacaatgatttcttttttcccccgtggaactaagtgggccttgataaaatcttctagaattagaaatttcagggtaaagaacttttttttgcttcgaatgctttggccatctctacattagaaagccttggccgggcacggtggctcatgtccgtaatcccagcactttgggaggccaaggtgggcggatcacgtgaggtcaggagtttgagaccagcctggccatcatggcgaaaccccgtctctattaaaaatacataaaaattagccaggtgtggtggtgcatgcctgtggtcccccctactcgggaggctgaggcagaattgcttgaatccagaaggcagaggttgcagtgaaccaagatcgtgccactgcactccagcctgggcaacagagtgagaccctgtctcaaaacaaaaacaaaacaaaaaaaaaacaagccttgtgtttctgagatatcttcgaatacaaggcaaaattgggattgagaataacgggaacttttggcagattatttatcaactttagtttatttcagagtccagattgagtgggaatagtgatacagatgccttctttctttcttctctgtctccccacctgttctctcctgcccatccagcggtaggtagtccttactcagagagtggaaacagagaaagggcttgtctcagacccatcgagcttttgcccagtttttccctacaaattgtgaagcagattcacagaggacttgcttcatggttggttcattcatatgcccctcagcaccgacaggctgaaattaacataaaaaccaaaacagaaccacttcctgtcctgtggatatccttactgttgagttattgcaggtgtttagcttcttaaccattgcagaagctcccgggtagattgtggaggaagctgccctccaggcctttcctgccccttggcagacaacccgagccattgttattttaatccatttcacacatcagattttggctgaagattttgtttgttggtttgttttcagacagggtcttgctctgtcacccagcctggagtgcagtggcgggatcagggttcactgcagctttgaccttcctgagctcaagtgatcctccttcctcagcctcctgagtggctgggactacaagtgcatgctaccacacccgctgatattttattttttgtagaggtggcgtctcgaattcctggtttcaagcgatcctcccaccttggcctcccaaagtgctggggttacaggtgtgagccactgtgcctggtcagattttagtttaagattttgtttgagcaagggttatggctgttaacaagcgagccagacactggattagatggcctgtgagaaaccttttacttttgctgtgaaaggagaaagaaacttgtttttcccactggtgagaagaattcaaaccacagacagatctgtaggtaggactgggactcgggaagctgaagttctttttactggcagaagcagcgcagccctaagcggtgttgtgcttcggagagtgttccctctaacaagaggggagtggacccacgctctgaaatcccatgcagtgatgtgatgatgacttgtcctttctctcctctgtgaaccgtagcagcgcctccggcccctcctgtgacgcacagcactcctgtaactgtctcagaaccactcctggagaaagacttccttgcaggagtgactcaagaattaatcagtaaataccttgaaatgcttgtaagctactgtgctgtatgtttctagtagccacagaataccttttaggcgacataaaaatcctcattttcgtgtggttttgttgagggggttctggctgatagcatatgtccagttcctctttggtcctaaccaaagggaagtgtacttttagggggaggggagagaaattccaaaaactttcagaaggtactgaagacatggaatttctgagggccagtttttccagtgctttctgtgagaatacttcattatttgctgatgacgcacttttccttgacctctgtagagactcttgaagacaactctgaaaagtgggctgtgactcccgatgcaggggatggtgtggtcaagccctcgtctagagcagacccagcccagacctctgacacattagccttgaacaaccagatggtgacccagaacaggactccacacagcgtttgccaccagaaaccacaagcaaaatctggatcttgggacctccaaacttatagcgctgaccaacgcacaacaggtagcagagaggtgtttaggcacaaaaattaaggggagatcctagctttaattctgggaatttttgaggaaggatgacatttcatttaaagtttgatagaatcgggaacttctattagggaatggtactgcaagtagaacagaattgatttaagagccagaacgtttcctttgggctcctgacttcaggtgcagcccttttcagctcctgataatagcaggaagcggaaacgactgcatggagagctgtccctcccagcagcaggtctgtcatgagcacgaggccacttggtctaggagaatcatctgccttcctcctaacagtaattctcattcttgggcttagtctaaattaggatcattaatataatccagaaatcattagctgtcagtttattttaaaattatggcagctacatttaagccattttgtcttccataggaaactgggaatctcataggaagagccaggacatgaagaaaaggaaatatgatccatcttaactgaggctcaggccacataattggactctgtcacaaagggactttggaaaactactttttggtcatgaaattgttcatcgctgctggagaatgaacgtcattgcgatttatcttgcttcattctgaaccttatcaagaggatctgactgagagccca

SEQ ID NO: 13655 - DNA, 808 bp, Homo sapiens
cctccactcaggcctccagagccagccagccgtgcgtgtcctcccagcagccgcggctgttgctcaggagcccgtcctcgccgccgccctctcatgcagaagcctgagctcatccgccgtggagagcgaggccacgcaccagcggaagctccggcagaagcagctgcagcagcagttccgggagcggatggagaagcagcaggttcgagtctccacgccgtcagctgagaagagtgaggcagcgcctccggcccctcctgtgacgcacagcactcctgtaactgtctcagaaccactcctggagaaagacttccttgcaggagtgactcaagaattaatcagtaaataccttgaaatgcttagactcttgaagacaactctgaaaagtgggctgtgactcccgatgcaggggatggtgtggtcaagccctcgtctagagcagacccagcccagacctctgacacattagccttgaacaaccagatggtgacccagaacaggactccacacagcgtttgccaccagaaaccacaagcaaaatctggatcttgggacctccaaacttatagcgctgaccaacgcacaacaggaaactgggaatctcataggaagagccaggacatgaagaaaaggaaatatgatccatcttaactgaggctcaggccacataattggactctgtcacaaagggactttggaaaactactttttggtcatgaaattgttcatcgctgctggagaatgaacgtcattgcgatttatcttgcttcattctgaaccttatcaagaggatctgactgagagccca

SEQ ID NO: 13656 - DNA, 1139 bp, Homo sapiens
gatctcttccccttgtccatagcctagatcgagctccctgtgtgcaccgcgcgctgcccgaggcgcaggtcaaccagaatcaagatgtctgggactgaggaagcaattcttggaggacgtgacagccatcctgctgctggcggcggctcagtgttatgctttggacagtgccagtacacagcagaagagtaccaggccatccagaaggccctgaggcagaggctgggcccagaatacataagtagccgcatggctggcggaggccagaaggtgtgctacattgagggtcatcgggtaattaatctggccaatgagatgtttggttacaatggctgggcacactccatcacgcagcagaatgtggattttgttgacctcaacaatggcaagttctacgtgggagtctgtgcatttgtgagggtccagctgaaggatggttcatatcatgaagatgttggttatggtgttagtgagggcctcaagtccaaggctttatctttggagaaggcaaggaaggaggcggtgacagacgggctgaagcgagccctcaggagttttgggaatgcacttggaaactgtattctggacaaagactacctgagatcactaaataagcttccacgccagttgcctcttgaagtggatttaactaaagcgaagagacaagatcttgaaccgtctgtggaggaggcaagatacaacagctgccgaccgaacatggccctgggacacccacagctgcagcaggtgacctccccttccagacccagccatgctgtgataccggcggaccaggactgcagctcccgcagccgcggctgttgctcaggagcccgtcctcgccgccgccctctcatgcagaagcctgagctcatccgccgtggagagcgaggccacgcaccagcggaagctccggcagaagcagctgcagcagcagttccgggagcggatggagaagcagcaggttcgagtctccacgccgtcagctgagaagagtgagggtgagcgaggggtgggagcagggccctgggaggcgtctgcaggaggaagtgtagccgcagggtcttctgattctctgcggtaaccctgggccggctccaaaccaggcctcgctgggacttctctcaagctacacgcag

SEQ ID NO: 13657 - DNA, 19737 bp, Homo sapiens
atctaagatctcttccccttgtccatagcctagatcgagctccctgtgtgcaccgcgcgctgcccgaggcgcgtaagtgggggaggagagcggcttcccccggggtggttctagccgtgggtgtggagcgtgggaaggctcagcttccgggtcgagaacctggggctgcggtggacctgatcctgaggtctcagcgtagagatgctgagtccagaggcctgttctagttcaccagtgcagtgaggggctcagtatccgggcctcccgagaggtgggtaggaaggcggggtacaggaaacttggcaccaacgcgccgggaccccaccgcggtgcggacagccaggtgtccgtggtggcgcttccttggagatgctgcctgcagacaggcgtggggaatctgaagtttgtgttaatagctaaacgaagttgagttgcagggagcgggggacgctgggaagaaatgattgatttaaaaggaatttgacgccgggcatggtggcggcatgcccccatgttccctggaggtcaagcctgcagtgagccgagatcgcacccgtaccacgacactccgtcccgggcgacagagcgagaccctgtcacgggggaaaaaataaaaataaaaatttgacgctcactttagctgagtattgagccttgttataacattgagatagaggtctggcgcggcgtctcacacctgtaatcccagaactttggaaggccgatgcgggaggatcgcttgaggccaggagttctacgccagcctggctaacatagcgaaaccccgtctctactaaaaatacaaaactaggcaggcctggtggcgggcgcctgtaatccccgctactcgggaggcggaggcatgagaatcgcttgaacccagtaggcaggtgtgccggtaagccgacatcgcaccactgcactccagcctgggggacagagcgagaatccatccaaaaaaaaaaaagttataattcacgtacaattaaattcactcccttttttaaaaaaaagtggagacatagtctcgctctgttgcccaggctggagtacagtggcgccgtctcggctcactgcaacgtccgcctcctgggttcaagcgattctttgcttcagcctctcaagtagctggaattacaggcgcataccaccacacccagctactttgtatttttcaccatgttggttaggctggtctcgaactcctcgcccttccaaagttcagggattacaggtgtgagccaccacacccagtctaaattcacccttttaaagtgtgcaattcagtggttttaatatattcacaaggttgtgcaatcaccactattatctaattccagaacatttttatcatccctaaaagaaaccttaaaaccattagcagacacccattatttcctcctactcccagcagcactaatctatgaatttacccattctcagtactgtattatacaatatttgttcttttgtgtttggtttatttcacttcatgattcaaagtccatctatgttgtatgtagcatgtatcaacttcattttttaaataactgaattatttattgtgtggatataccacattttgtttctccatttttgatggatactggtgattttctaggctttctaggtctagtcctccacagaactcgcagtctgaggcacagacatttaaaacttaagtttttggaaactagcatttaactcttgggttgggtcaggtaattcagtggcctcaggtctggtatcgtttagggcagttttttttttgttttttttttttttttgagatgaagtttcactcttgttgcccagggtggagtgcaatggcgtatctgggctcactgcaacctcacctcctgggttcaagcgcttctcctatctcagcctcctcggtaactgggcttacaggcgcatgccactatgcccggctaatttttggtatttttagtagagacagggtttcaccatgttggccatgctggtctcgaactcctgacctcaggtgatccacccatctcggcctcccaaagtgctgggattacaggtgtgagccaccgcgcctgggtgggagttttgtttttttgtttgtctgttgttttttggggggacagagtttctctcagcctcctcggtaactgggcttacaggcgcatgccactatgccaggctaatttttggtatttttagtagagacagggtttcaccgtgttggcaatgctggtctcaaactcctgacctcaggtgatccacccgcctcggcctcccaaagtgctgggattacaggtgtgagccaccacacctgggcgggagttttgtttttttgtttgtctgttgtttttttggggggacagagtttcgctcttgttgcccaggctggactgcagtggcgagatcttgactcactgccacttctgcctcctggattcaagcgattctcctgcctcagcctcccgagtagctgggattacaggtgtgcaccaccacacccggctaattttgtatttttagtagagaaggggtttctccatgttggttacgctggtctcgaactccctacctcaggtgatcctcccgccttggcctcccaaagtgttgggattacaggcgtgagccactgcgcccctctgggagtgttttttaaagtgttctattctcagttcaccacttaccaggccgttaattatcgtggtatcaagcagagaaatgtttgtgtgctggtcttctcagggaggcagaaaccgtcagagattgctgttgtgtaatgtacaccaaaacgtgttatcttgtagtataaacggtgtagttggagatgagtgtatgaaaaatgtaactgagctagctgtgggagagactagttgtgaaaaattttgagtcacccactgtatgctttcccagctatgttcaaataaggtgacactctgccttcctgtttcagctctaaaactgttcataagtgttattttggctgtatacgtagtgccatgtttttttgtatttttgtgcttttggtgattttgctgtttataggggcctccaagaatagaagtgctgtctagcatttccaagttgaaggctgtgatatatcttatagagaaaagataagcttttagattagctttgttcaggcatcacttttgttgttggctgtgagttcatgttactgcatcaacaatatatattaaataagatatctttaaacagaagcacacataaaacaaggttatgtattggcctgttgagtaaccctgtatttcccctgggagcagtggctcagtatttgctagttcagtgttcatgatggctttacaggacataactaccctgaataatgagaactgactgtctcagtagtgcttcaagggcagaaagcctagtggatatttttccatctctgcagcttttagcatttcttcactcaaggcactcatttttaatattgaactggcagttttgatgtggagagaagctaaaataaggctaaaatgctcttcatactatgtgctgagtggggactgtgctgagtgttggggattcagtgattagtgtatggccccgcagttctctaatggctgagtgtgggagtgcagagaaatgatcagtgtgagggaattaatcctatgttcccaccgtgtttttttgttttttttgagacggagtttcactcttgtcgcccaggctggagtgcggtggcgtgatctcggctcactgcaacctccgtctcccaggttcaagcgattctcctgcctcaacctcccgagtagctgggattacaggtacccgccaccgtgcccagctaatttttgtatttttagtagagacggagtttcaccatgttggccgggctggtctcgaactcctgacctcatgatctgcctgcctcggcctcccaaagtgctgggattactgggttcccacaaattttaagacttacttcaggccaggtgtggtggcttatgcctgtaatcccagcattttgggaggccgaggtgggcagatcacctgaggtcaggagttcgagaccagcctggccaacatggtgaaacccctgcctctactaaaagtacagaaaattagctgggtgtggtcgcgcatgcctgtagttccagctactcaggaggctgaggcaccagaatcacttgaacctgggaggtggaggttgcagtgagctgagattgcgccactgtactccagcctgggcaacagagtgtctccccctcaaaaaaaaaaagacatacttcagagtgtggtgagctgcataaggctttagaggtaatgacattttgagatttcaattaaaaattttttttctactttttttttttgagacagagtctcactcttgctcaggctagagtgcagtggtgcgatcttggctcactgcaaccttcgcctcctggattcaagcgattcttgtgccttagcctcctgaggagctgagattacaggcacctgccaccatgcccagctaatttttgtatctttagtagagaagaggtttcatcatgttagccgggctggtcttgaactcctgacctcaggtgatctgtctgcattggccttccaaagtgctgagattacagatgtgagccaccgtgcctggccactttttttctacttttgctaatttttttaaagtttcatgaacattatagtactgtgttcataaatgaaaataaaagaaacttgctccagtcttgttcatcaagccgttcttgaccttcacagtcagaatctcacccatcaccttgtcacatctccctcttgatctgtatatccagagtccacctgacatgcttcttcagccctccacatataataagaaatggttttgtgagccgagattgtgccattgcactgcagcttgggcaacagtgtgagactcctcaaaaaaaaaaaaaaagaaagaaaaatgcttttaggtgataaggaaatggagaagaataaaacatctttgccagtctttacctttttaatatcttgaattcatgatttcttgccatagccactatcctagtccaggctctctcccttctacccctgagttttttttttttttttttttaccatgtttttatttcctctgggaaaacacctatcagaattttgggatcatatgacagatacatatttaatttctttctttcttttttgagacagggtcttcctctgttgcccaggctggagtgtagtggtatgatcatggctcactgcagccttgaccccttcctcgcccccgctcaagtgatcctcccaccacagcttcctgagtagctgggactgccggcatgctccaccatgcccgactaacgttttgctgcttgtagagacagccatgttccctaggcttgtcttgaactcctgagcctcaagcgatccttccacttcagcctcaagtgctgggattacaggcgtgagccaccactcctggctacttaatttctttctttctttttttttgagacagtctcgttctgtcacccaggctggagtgcagtggggtgatctcttctcactgcagcctctaccttccaggctgaagcaagccttccacctcagccccctgagtagctaggactacgggaacattccaccaggcccagctaatttttgtattttttgtagagatggagtttcatgatgttggccaggctggtcttgaactcctcacctcatgcaatccgcctgcctcagcctcccaaagtgctgggattacaggtgtgagcaactgcacccagcgggccccgcccagacctattttcaaaattagaaaaccgtgaggcttctggaagaagatgagaagaatatcttcatgacctgagtgtgtgcaaaggtttcttagggctcaggatgccagagtcacttaaaaaagcaaaaaaaacccaaaaaaaaaaccacacacacaaagataaatatgattgattacatcaaaatgtaatcacagactactctaagaaaatgaatggggaaacacagggacctatttgacaaaagactgatattcaagataaataaagaactaataggccaggcgcggtggctcacgtctgtaatcctggcactttgggaggccgaggcggggggatcacttgagctcaggagttcgagaccagcctgagcaatatagtgaaaccccatctctactaaaaatacaagaattagaattagctgggcgtgatggcacgtgcctgtagtcccagttactcgggaggctgaggctggagaattgcttcagtcaggaagatggaggttgcagtgagccgagattgtgccactgcactccagcctgggcgactgaacaagacttcgtctcaaaaaaccagtagggctccaggcctgggattgggcctctgctgctctactccctggacgtgtggctccgtccttggagtcggcctttggttttcatgaagagtagtgtgcattaacagctgagtggttttatcagcctgtttcctgccaacagtgtatgagagttccagttgctttacatccttgccagcatttggtgttgtcagtcttttgagttattctgatgggtgtggtgtgtcatggtcttaattttagtcctcagtcactaatggtgtttagcactttttcctgtgcccatgacaatgtgcatcttcctttgtgaagtgcctgctcaaatcttttgcccattttacattgggttgtgtgtctttttattattgagttgtagcagttatttatataacctttatatcctggttacctgtcctctgtctggttgcctattcattttcttagagttgtctgatgaacagaagttttacattttgatgtaatcagttttctcttatattttcttttatagttactgctttctgagtcctaggaaatcttggctaccttcaggctgtgaagataatctttcatgttttcttctgtaagttttttttttttttgagacagagtcttgctctgtcgtccaggctggagtgcggtgatggcgatctccgctcactgcaacctctgcctcccaggttcaagcgattctcctgccccagcctcccgagtagctgggattacagacatgcgccaccatgcccaactaatttttgtatttttattagagacagggtttcaccaggttggccaggttggtcttgaactcttgaccttgtgatccacccgcctcggtctcccaacatgctgggattataggcgtgagccaccgtgcccggcctataaattttatagttttagttttatgtttaagcctatcacccatttctagtttaggtgaatggtgtgagatataattaaatattaatttcttttccatatagatatccagtcattccagcaccatttgttgaaaatgctattgtattgcgttttggaaattaagatgactgtacaaatggtaattgatgtctgcactcccttttctgttccattgttcaatccttgtgttagtaccacacttttaattactgtagctttttagtaagtcttgaagtcatgtagttgtaggtcttccaattttgttgttttcaagcttgatgtgaatattctaaatcctctgcatttccatataaatatcagaattatctttaccagttttacagaaaagtctggtaaagttgtgattgggattgcattgaatctatggatcaatttggaaagaaatgacacctaaacagtattgagtcttcaaatatatgaacttggtgcattttccttcttatttaagccttttaaaatttctttttaggccgggtgcagtggcttatgcctgtaatcccagcactttgggagtctgcagcgggcagatcagctgaggtcaggagttcgagaccagcctggccaacatggtgaaaccccgtctctactaaaaatacaaaaattagccaggtgtggtggcaggtgcctgtagtctcagctacttgggaggctgaggcaggagaactgcttgaacttgctcaggaggtggaggttgcagtgagctgagatagtgccattgcactccagcctgggcaacaagagcaaaactctgtctcaaaaaataataataataaaaataaaaattttgggccaggtgtggcggctcacacctgtaatcccagcaatttgggaggctgagccgggtggatcacctgaggtcaggagtttgagaccagcctgaccaacatggagaaaccctgtctctacgaaaaatacaaaatttgccaggcatggtggcgcatgcctgtaatcccagctactctggaggctgaggcaggagaatcacttgaacctgggaggcagaggttgcagtgagccgagatggtgccattgcactccagcctgggcaacaagagtgaaactctgtctcaaaaaaaaaaaattcttttagttctgttttatggttttcagttcagaagtcttatacatattttgttaaattgatttctagatatgtttcttacctttattgtaaaatggagccatcatttgcatcattcattactctgtatgtaatgtgttatcattctctacctgctttcaagattttctctttatttttgttttttagcagtttgtctgtggtgtatctaggtgtcattttatttgtatttatccggagatttattcttgagatttgcagagcttcttaaatctgtaaatttatgtctgtcggccaatttgggaaatttggagctattagttttaaaaatatttcttctgttccattctctttcacttcttctgtatgtgagttcaatttcacttcaattgtatgtgagttagacattttgatattagcccacaggatcctgaggttctttcattcttttcaatcttttttttttctcgaagtttgcatttcgtgagcaggagtgacagtcattcaggatgatttttgagattcctagttcaagagtagttcctattcttttctaggtgtagtcaagtatggcttctaattctactagaaggcttttttgtcggggaggtggttctatgtcctttggctcttacattttctttgtgtctttcacagcacagttttcagagggtaccctttctctttggttttgttttgttttgttttgttttagacggagtcttgctctgtctccaggctggagtgcagtggcgcaatcttggctcactgcaacctctgctcactgctacctctgcctcccgggttcaagcaattctcctgcctcagcttcctgagtagctgggactacaggcacgcgccaccacacccaactaatttttgtatttttagtagagactgggtttcatcatgttggcaaggctgttctccatctcttgacctcgtgatccgcccgccttggcctcccaaagtgctaggattacaggcgtgagccaccgcgcccggccaacagagggtaccctttcattctttttctccttcttcccagaaggcttgcgttttcaagactacctcatcaagttctgcatgtgtttaaaagtgtctctacccgaccttcccttcctccctcccgatttaacggaattctttgttggtgttttcatacttaccgtgagttttctttttcagggtgatattttagttccatcttaggctctccattgtcctcttctctcttctttttttttttgagacagagtctcattctgtcacccaggctggagtgcagtggtgtgatctctgctcactgcaacctctgcctcccaggttcaagtgattctcctgcctcagcctcccgaatagctgggattacaggcgcacacaaccacgcccacctaatttttgtattttcagtagagacggggtttcaccatcttggccaggctggtctcaaactcctgacctcgtgatccgcctgcctcagcttcccagagtgctgggattacaggcatgagccaccgcgcccggtgcgcccagccctcttctctcttctttgcatctctcttcctatctggatccctctttgctgtccttaaagagctgagatgagagattgagaaacatctctacaagaaattgacgtttttctacttatgggtaattagaagcttgtagtattttcagtcttctaagtatgttgaagatatgagacgttggtgattttctttgtttctccggttggttggtctgtgtagtttttggacatgtgtttggatatttggatttatatagctgccataatcttggctatgcaggtagtctttcctgacacttcatcctgaaagatttgaagcctttggacaaattttacagtgggctgggtgcagtggctcacgtctgtaatcccagtgctttgggaggctgggcaggaagattgcttgagcccaggagtttgagaccagcctggacaacatagtgagacccgtgtctctacaaaaaataaaaaatatgccgtgtgtggcgttatacaactgtagtcccagctacttaggaggctgaggtgggaagatcacgagccaaggagtttgagggtacggtgagccatgatcgcctcactgcactgggtggcacagcgagactgtctcaaaaaaaaaatttacaattaatgtctgcatatccttcacctaggttcataaatttgtacttttgctttatctacttgcctttttctctctctctacacacacacacacacacacacacacacacacaattagttgaatgaattgagagtaagttgcagaaaacatgacactttactccaatattgcatcatacaaaatcatacatctagtgataggccattgtcctacagaatcacgatataattatcacactaaccagctgtggtggtgcacacctgtagtctaagctactcgggaggctgaggcagaaggatcacctgagcccaggaggttgtggctgcagtctcatattcatcccatcatcagatttctcccattgtcctaataatattctttatagcttttctttatccctgatccgaaatttcattgaagatcacacagtgcatttagttgtcatgcctcttaagtctttatttatttattatttattttttgagatggagtcttgctctgttacccaaactggagtgcagtggcatgatcttggctcatgcaacctccacccgctgggttcaagtgattatcctgcttcagcctcccgtgttgctgggactacaggtgtgtgccaccatgcccagctactttttatatttttagtagagacgggaattgtaccatgttggccaggctggtcttgaactcctgagctcagatgatccacccgccttggcctcccaaagtgctgggattacaggcgtgggccaccacacccagccttaagcctcttttaacataaaagagttcaccagccattctattttgttttgctttttgagacactgatgctttggagagtccaggccagttgctttgtagatttcaacttgtttgattgtttcctgatgattaggttggtagaaatactacctcaatgatgggaccttcttagtgcgtccatcaggaagcacatgatgtgactgtaattggtgacattaagtttgattccttaataattaaggtggtaactcccaggtttctacattgtaaaggcatcttttgccgccctcctttttattcccaagtagtttatttggagattagtcctttacacagtagaggagcggggaagggagacaggaaaggaaagtttgacaacaaagggtgagttttcaagcctgttgccacgggggaacctaattccactggagaagctcatggcttggtgatgttccacagaggggtcagaaatttagcgtatttcaacaccagctcctgtcaggcaccatttgagggctgctgccagggtggttcaattttctggtgcttacagcttgccataaacaggtgcaaagtagtctggataccaaagaaagctctcaggtaacaagatgcagatgttggcatttggaagtcagaatagggtgcactattgtggtaagagctgaagggatggctgggcgcggtggctcacacctgtagtcccagcactttgggaggatgaggcaggcggatcacctgaggtcagaagttcgagagcagcctggccaacatgacgaaaccccgtctctactaaaaatacaaaaattagccaggcgtggtggtggatgcctgtaatcccagctattcagtaggctgaggcaggagaattgcttgaatctgggaggtgtaggttgcagtgagctgagatcacaccactctgcactccagcctgggtgacagagcgagactctgtctcagaaaaaaaaaaaagctgaagggatgctgagtagagcatccgtagtgtctgctatacctgggtaccctagaacctggagaacctacagcttgaggcaagagcgtatgtgctattattttttcaagaagtgtgctctcaggaagcagaggtaggggaaaggtgagtgaagggagaaggaagattaagtcagttcaagggtgcattttgaagttggttgcccttggtgcaagtacagttggttgcttgttctcctaaagctgtctcccaggaggatgtatacataactgcattccagggcaatccatctaaaggaagggtggacggacccctcagcttctgtatctcactggaaaaaggtttgcttcatggcacattaattcccatagacttctaggttgtgcatgtgtgggtaccaggtgggtcccacagacccttacacctccaaggcaagcagcaagccacgggtgggaagtgataggtacccagtatgagcaggaggtaagggaccgtggggttgtgcctgtgggcagttggttataacccagacgtgtttgatcagcccagtgacagctggagtggacaaagtgaccaagggcctcaaggacacacaaggccaagaagatttgaagtgctgtgtaagatatgcctaatgcatttggattctacctttgtttaacgaatatgcacacataaaaaacacttgaactccttgagcccaggagttcaagaccaacctgggcaacatagtgagacactcatctctaaaaaaattttaaaaaaaattaacctggcatgatagcactcacctgtagtcctgtctactctggaggccgcagtgggaggatcacctgagccctggaggtcaaggttacagtatgctatgattgcaccactgcattccagcctgggtaacagagcaagacgctgtctcttaaattttttttttttttttttttacttttataatggaaaaaccattgtagacagttttaggaaggaaagcagaatagtaagacatctttttcaaagtaaaagagcaaaaaaggcaaaaaatatttcacatttactttatggacaaagataagattgtccttcaataaaagactgaattttttttgtttgttttgttttgttttttgagaaagagtcttgctccattgcccaggctggaatgcagtggtgtggtctcggctcactgcaacctccgcctcccgggtacaagcaattctccagcctcagccccccgagtagctgggactacaggcacgcgccactgcatctggctaagttttgtatttttagtagagatggggtttcaccatgttgaccaggctcgtcttgaactcctgacctcaggttatccacctgcctgggcctcccaaagtgctgggattacaagtgtgagccaccgtgcccggccacaagttgctctttaaatgtgagaagtgttctggcatggtggctcacacctgaggcgggtggatcacttgaggtcaggagttcgagatcaggctggccaacatggtgaaaccccgtctctagttatttatttatttatttatttatttatttatttatttatttttttgagacggagtttcactcttgtttcccaggcgggagtgcaatggcgcaatctcggctcactgcaacctccgccttccgggttcaagcgattctcttgcctcagcctcctgagtagctgggattacaggcatgcaccaccacacccggctaattttgtatttttagtagagacggggtttttccatgttggtcaggctggtctcgaattcctgacctcaggtgatctgccctcctcagcctcccgaagtgttgggattacaggcgtgagccaccacgcccggccctgtctctactaaaaatgcaaaatttagccgggcatggtggcgcacacctgtaatctcagctactcaggagactgaagcagcagattcgcttgaacccaggaggtgaaggttgcagtgagctgagaccacaccactgcagggcagcctaggcgacaagagcgaaacgcttacaaaaaaaaaaaaaaaaaaagattcacaggtgatggtgatgctgctggttaaggaagtgaagtggctttttgctctgtagccttcctgaatgttggggcctcctgctcttcatttgtttcatttctattaagtctcctccctccagctatcttgttagctcctggaaagcatttcagtgattgtggcttctatttctttttgaccccacagtgtccagggtcatgctgcctatatagtagtgagcagtaagttgaggtttttaaaaactttattattattatttttgagatggagtcttgttctgtcacccaggctggagtgcagtggcacaatctcagttcactgcaacctctgcctcccaagttcaagtgattctcctgcctcagcctcccgagtagctgggactacaggcgcctgccaccacatccggctaatttttttgtatttttagtacagatggggtttcactatgttggtcaggctgatctcgaactcctgacctcaggtgatccgcctgctttggcctcccaaagtgttagggttacaggtgtgagccaccacacctggccggtttttttaaactttaaaacagattcacttgatttttcttccctaccccccagcttttttgaggtatgactgacaaaaattgtatatatttagggtgtacaatgtgatgatttgatatgtgaatgcactgtgaaatgattaccacagtcaaggtaattcacatatccaccacctcccagttaccctcttagctagtacaggttgggtattgcttctctgaaatgctttgggaccagaagtgttttggacttcagattttggaatatttgaatatatataatcagatatcttgggaaggggacccaagtctaaacatgaaattcatttgttttcagagcctaaagatgatttttttttttttttttttttgagatggagtctcactctcgcccaggctggagtgccgtggcacaatctcagctcactgcaacctctgcctcccaggttcaagcgattctcctacctcagcctcccaagtagctggaattacaggctcgcactaccacacccggctaatttttgtatttttataaagacatttcaccatgttggccaggctggtctcaaactcctgacctcaggtgatccgcccgcctcagcctcccaaagtgctgggattataggtgtcagtgactgcgtctggctgataattgaatttttctcttggagaagctgaataaactgtgtgttgtgtgcctgcctttttttttgtttttttttttttttgagacagagtcagacactctgtcacccaggctggagtgcgatggggtggtcatagctcactgcagcctcaaactcctgagctcaagcgatcctcccacatcagcctcctaagtagcatagcaccacgcctggctaatttttaaattttttgtagtgatggggttttgttgtctaggctagtctcaaactcctgggctcaagcagtccttctgccttggcctcccaaggtggtaggattataggtttgagccaccatgcctggccattacctgtgttttgactataacacatcatgttggcactcaaaacgttttggattttggagcattttgaattttggatttttggattagcaatgttccacctatagtacattttttgtttgctttcccataaagaattttttgtaattttgattttatagttctaaatgtaatatattcttattgtaaaaatcacctttaatagcaccgccagaatagcaaacatgttaacagaaaggtagaagtagaccttaaagaatcttcagcagcttgagagaccacagctaaccactgaggaactctgttctggattggagcagtgcttagaagcttataaataactcttagggtattgcatagggattctttttttttttttttcctgaaatggagtctcgctctgtcgcccaggctggagtgcagggtgtgatctcagatcactgcaacctccgcctcctgggttcaagcaattctttgcctcagcctcccgagtagctgggattacaggcgcctgccaccatgcccagctaatttttttggatttttagtagagagggggtttcaccatgttagccaggatggtctccatctcctgaccttgtgatccacccacctcggcctcccaaagtgctgggattacaggcatgagccactgtgcctggccgcataaggattctttatgtgatttttcagtagaggctcttgccttttactttaaacattctttgagggttgttttttttttccgctttttatttatatagaggtcaaccagaatcaagatgtctgggactgaggaagcaattcttggaggacgtgacagccatcctgctgctggcggcggctcagtgttatgctttggacaggtaactgtggttccttcatgccgggaaagaatgaggtgaagtgagtaaagttagggcaaggcagtttgtagagcatcgtagtacatgtgtgagcagtacctagtacgtttacctagtacgtgtgtgagcagtacctagtacgtttacctagtacgtgtgtgagcagtacctagtacgttgacgcggtgcgtgcgggggcagtacctagtacgtttacatagtacatgtgtgagctatttgttattggtttttcctttagatgcattttttgggagtcttgtgaactctggagggcattttggaatgttagctatcaaaagactgatagtactggggattagatttagattttaaattttttgtggggggggatagataacatatttgtatgacatcaaattcaaaatgaaactgtgaaaatctccctatttcctattgcccctgtgtgcatgccacccagttctatttcttttttttttcgagactgagtcttgctttgtcacccaggctgcagtgcagtggtgcgatctcagctcactgcaacttccaccctctggattcaagcaattctcctgcctcagcctcccaagtagctgggataacaggcatgcaccaccatggccagctaatttttatatttttagtagagatggggtttaaccatgttggccaggctggtctcgaactcctgacctcaggtgatccgcctgcctcggcctcccaaagtgtttggattacaggcgtgagccaccacgcccgggcttaatttttttgtatttttagtagagatgtggtttcaccatgttggccagggtagtcttgaactcctgacctcgtgatctgcctgcctcggcctcctaaatgctggaattacaggcatgagccaccgcgcctggctccagttgtctttcttggaggcatggaaagttactgggggtcctattccttgtagggacattgtgtgcacagaaaagagtttcttgctttgtccacccaaactccatctttgtctttagcagagagttgtgagtattcatctcatctgagcagggcaagggggacaaaacccaaatcagcaagcagtagtgtgtttctgtttgtgcaggatgggaaattgttgtattggagaaggcgtcaatctctggaaaggacaaatggaagcaaggcttcctacccccgtgctctttccgtacttgcttcctgtgctgacgtcatttacagatctggaggcagaacattttagcttcctaagcttcagaaacatttataaggatggtagcagcagctaaggcagcagttctcaaaatgcagttctcaaaaaccctggggtttctgaagatctttcagagtccagaaggtcaaaattatcttcataataatactatttgcctctttcacactcattgtctcatgagtgaatggtagagttttcagagagtgcatgatatgtggtgatgtcactgctatgatgcctaatggcatgcatgccttaaaagtttctcagttttgattcctaataggatacatagaacccacataaacaaaggttctggggggtctttttaagagtataaagtctccataaaggatggagactcaatgatgtgaggaatggtggaagtgtgaatttaattttcttttttggggttgcagtgccagtacacagcagaagagtaccaggccatccagaaggccctgaggcagaggctgggcccagaatacataagtagccgcatggctggcggaggccagaaggtaggagaattcatgtgcctggaaagcaggcatccataccgcagactccgatggtcttgccagttccctctctgggtcctcagggattcggaagtctgctgttaactgttcctggaggtctcccagtgcccctgggaggggatgggttccagacttcattctcatccgaaggggcctgggcatggtcttgacactcgcataaccgccgtcttaagatttttacatcatctttttttttttttatttttaaagacagggtcttgctctgtcacctaggctggagtccgaccagtggtgtcatctcagctcactgcagcctccacctcccaggctcaagcgatcctcctgcctcagcttcctgactagctgggactacaggcacacgccaccacacctggttaattttttaatgttctgtagagacgacatctcgccatgttgcccaggctgatctcgaactgctgggctcaagtgatcctcccacctcggcctcccaaagtgctgggattacaggtgtgggccaccatgcccagcctttacaccattaaaaaaaaaatgttccttttgccatttgctttttttttttaattaaacactttttaaagaacttatgattgacacataataattgcatatcatttgcttctaattttaacttctgtgtatatttttggtcttccataaaatatgtcaaacagatttgtactttttgcaaactgaattttagcaactgctgggtgagttcctcctcccaacagaccattcgttctcgcgggctccatctagaagatttttgaaataaattcattgagaattttcttgaaaaaaaaattttttttaacagactggttctcactctgtcacttaggctggagtgcagtggcacgatcctagcttactgcagccttgagctcctgggctcaagtgatcctcccacctcagcctcccgagaagaatgtttaaggacagtttatcgaaaaaagtagatgaggaataaattatgtcaattttgattcacatttaagtgtggtaaggaattaacacagcttttccttaaaaacatttgtttttctaggtgtgctacattgagggtcatcgggtaattaatctggccaatgagatgtttggttacaatggctgggcacactccatcacgcagcagaatgtgggtgagtatgctctccagcagtggggacttctgcactgtccagctcctgctgaaagtctgctgtgggtgaggaggtaaggtaggtggactcagctgccagcaggaggaatggttg

SEQ ID NO: 13658 - DNA, 560 bp, Homo sapiens
atctaagatctcttccccttgtccatagcctagatcgagctccctgtgtgcaccgcgcgctgcccgaggcgccccagtgacagctggagtggacaaagtgaccaagggcctcaaggacacacaaggccaagaagatttgaagtgctgtaggtcaaccagaatcaagatgtctgggactgaggaagcaattcttggaggacgtgacagccatcctgctgctggcggcggctcagtgttatgctttggacagtgccagtacacagcagaagagtaccaggccatccagaaggccctgaggcagaggctgggcccagaatacataagtagccgcatggctggcggaggccagaaggtgtgctacattgagggtcatcgggtaattaatctggccaatgagatgtttggttacaatggctgggcacactccatcacgcagcagaatgtgggtgagtatgctctccagcagtggggacttctgcactgtccagctcctgctgaaagtctgctgtgggtgaggaggtaaggtaggtggactcagctgccagcaggaggaatggttg

SEQ ID NO: 13659 - DNA, 840 bp, Homo sapiens
agggccagtttttccagtgctttctgtgagaatacttcattatttgctgatgacgcacttttccttgacctctgtagagactcttgaagacaactctgaaaagtgggctgtgactcccgatgcaggggatggtgtggtcaagccctcgtctagagcagacccagcccagacctctgacacattagccttgaacaaccagatggtgacccagaacaggactccacacagcgtttgccaccagaaaccacaagcaaaatctggatcttgggacctccaaacttatagcgctgaccaacgcacaacaggtagcagagaggtgtttaggcacaaaaattaaggggagatcctagctttaattctgggaatttttgaggaaggatgacatttcatttaaagtttgatagaatcgggaacttctattagggaatggtactgcaagtagaacagaattgatttaagagccagaacgtttcctttgggctcctgacttcaggtgcagcccttttcagctcctgataatagcaggaagcggaaacgactgcatggagagctgtccctcccagcagcaggtctgtcatgagcacgaggccacttggtctaggagaatcatctgccttcctcctaacagtaattctcattcttgggcttagtctaaattaggatcattaatataatccagaaatcattagctgtcagtttattttaaaattatggcagctacatttaagccattttgtcttccataggaaactgggaatctcataggaagagccaggacatgaagaaaaggaaatatgatccatcttaactgaggctcaggccacataattggactctgtc

SEQ ID NO: 13660 - DNA, 399 bp, Homo sapiens
agggccagtttttccagtgctttctgtgagaatacttcattatttgctgatgacgcacttttccttgacctctgtagagactcttgaagacaactctgaaaagtgggctgtgactcccgatgcaggggatggtgtggtcaagccctcgtctagagcagacccagcccagacctctgacacattagccttgaacaaccagatggtgacccagaacaggactccacacagcgtttgccaccagaaaccacaagcaaaatctggatcttgggacctccaaacttatagcgctgaccaacgcacaacaggaaactgggaatctcataggaagagccaggacatgaagaaaaggaaatatgatccatcttaactgaggctcaggccacataattggactctgtc

SEQ ID NO: 13661 - DNA, 541 bp, Homo sapiens
aagatctcttccccttgtccatagcctagatcgagctccctgtgtgcaccgcgcgctgcccgaggcgcgtgtgctacattgagggtcatcgggtaattaatctggccaatgagatgtttggttacaatggctgggcacactccatcacgcagcagaatgtggattttgttgacctcaacaatggcaagttctacgtgggagtctgtgcatttgtgagggtccagctgaaggatggttcatatcatgaagatgttggttatggtgttagtgagggcctcaagtccaaggctttatctttggagaaggcaaggaaggaggcggtgacagacgggctgaagcgagccctcaggagttttgggaatgcacttggaaactgtattctggacaaagactacctgagatcactaaataagcttccacgccagttgcctcttgaagtggatttaactaaagcgaagagacaagatcttgaaccgtctgtggaggaggcaagatacaacagctgccgaccgaacatggccctgggacacccacagctgca

SEQ ID NO: 13662 - DNA, 22406 bp, Homo sapiens
gtgtgcaccgcgcgctgcccgaggcgcgtaagtgggggaggagagcggcttcccccggggtggttctagccgtgggtgtggagcgtgggaaggctcagcttccgggtcgagaacctggggctgcggtggacctgatcctgaggtctcagcgtagagatgctgagtccagaggcctgttctagttcaccagtgcagtgaggggctcagtatccgggcctcccgagaggtgggtaggaaggcggggtacaggaaacttggcaccaacgcgccgggaccccaccgcggtgcggacagccaggtgtccgtggtggcgcttccttggagatgctgcctgcagacaggcgtggggaatctgaagtttgtgttaatagctaaacgaagttgagttgcagggagcgggggacgctgggaagaaatgattgatttaaaaggaatttgacgccgggcatggtggcggcatgcccccatgttccctggaggtcaagcctgcagtgagccgagatcgcacccgtaccacgacactccgtcccgggcgacagagcgagaccctgtcacgggggaaaaaataaaaataaaaatttgacgctcactttagctgagtattgagccttgttataacattgagatagaggtctggcgcggcgtctcacacctgtaatcccagaactttggaaggccgatgcgggaggatcgcttgaggccaggagttctacgccagcctggctaacatagcgaaaccccgtctctactaaaaatacaaaactaggcaggcctggtggcgggcgcctgtaatccccgctactcgggaggcggaggcatgagaatcgcttgaacccagtaggcaggtgtgccggtaagccgacatcgcaccactgcactccagcctgggggacagagcgagaatccatccaaaaaaaaaaaagttataattcacgtacaattaaattcactcccttttttaaaaaaaagtggagacatagtctcgctctgttgcccaggctggagtacagtggcgccgtctcggctcactgcaacgtccgcctcctgggttcaagcgattctttgcttcagcctctcaagtagctggaattacaggcgcataccaccacacccagctactttgtatttttcaccatgttggttaggctggtctcgaactcctcgcccttccaaagttcagggattacaggtgtgagccaccacacccagtctaaattcacccttttaaagtgtgcaattcagtggttttaatatattcacaaggttgtgcaatcaccactattatctaattccagaacatttttatcatccctaaaagaaaccttaaaaccattagcagacacccattatttcctcctactcccagcagcactaatctatgaatttacccattctcagtactgtattatacaatatttgttcttttgtgtttggtttatttcacttcatgattcaaagtccatctatgttgtatgtagcatgtatcaacttcattttttaaataactgaattatttattgtgtggatataccacattttgtttctccatttttgatggatactggtgattttctaggctttctaggtctagtcctccacagaactcgcagtctgaggcacagacatttaaaacttaagtttttggaaactagcatttaactcttgggttgggtcaggtaattcagtggcctcaggtctggtatcgtttagggcagttttttttttgttttttttttttttttgagatgaagtttcactcttgttgcccagggtggagtgcaatggcgtatctgggctcactgcaacctcacctcctgggttcaagcgcttctcctatctcagcctcctcggtaactgggcttacaggcgcatgccactatgcccggctaatttttggtatttttagtagagacagggtttcaccatgttggccatgctggtctcgaactcctgacctcaggtgatccacccatctcggcctcccaaagtgctgggattacaggtgtgagccaccgcgcctgggtgggagttttgtttttttgtttgtctgttgttttttggggggacagagtttctctcagcctcctcggtaactgggcttacaggcgcatgccactatgccaggctaatttttggtatttttagtagagacagggtttcaccgtgttggcaatgctggtctcaaactcctgacctcaggtgatccacccgcctcggcctcccaaagtgctgggattacaggtgtgagccaccacacctgggcgggagttttgtttttttgtttgtctgttgtttttttggggggacagagtttcgctcttgttgcccaggctggactgcagtggcgagatcttgactcactgccacttctgcctcctggattcaagcgattctcctgcctcagcctcccgagtagctgggattacaggtgtgcaccaccacacccggctaattttgtatttttagtagagaaggggtttctccatgttggttacgctggtctcgaactccctacctcaggtgatcctcccgccttggcctcccaaagtgttgggattacaggcgtgagccactgcgcccctctgggagtgttttttaaagtgttctattctcagttcaccacttaccaggccgttaattatcgtggtatcaagcagagaaatgtttgtgtgctggtcttctcagggaggcagaaaccgtcagagattgctgttgtgtaatgtacaccaaaacgtgttatcttgtagtataaacggtgtagttggagatgagtgtatgaaaaatgtaactgagctagctgtgggagagactagttgtgaaaaattttgagtcacccactgtatgctttcccagctatgttcaaataaggtgacactctgccttcctgtttcagctctaaaactgttcataagtgttattttggctgtatacgtagtgccatgtttttttgtatttttgtgcttttggtgattttgctgtttataggggcctccaagaatagaagtgctgtctagcatttccaagttgaaggctgtgatatatcttatagagaaaagataagcttttagattagctttgttcaggcatcacttttgttgttggctgtgagttcatgttactgcatcaacaatatatattaaataagatatctttaaacagaagcacacataaaacaaggttatgtattggcctgttgagtaaccctgtatttcccctgggagcagtggctcagtatttgctagttcagtgttcatgatggctttacaggacataactaccctgaataatgagaactgactgtctcagtagtgcttcaagggcagaaagcctagtggatatttttccatctctgcagcttttagcatttcttcactcaaggcactcatttttaatattgaactggcagttttgatgtggagagaagctaaaataaggctaaaatgctcttcatactatgtgctgagtggggactgtgctgagtgttggggattcagtgattagtgtatggccccgcagttctctaatggctgagtgtgggagtgcagagaaatgatcagtgtgagggaattaatcctatgttcccaccgtgtttttttgttttttttgagacggagtttcactcttgtcgcccaggctggagtgcggtggcgtgatctcggctcactgcaacctccgtctcccaggttcaagcgattctcctgcctcaacctcccgagtagctgggattacaggtacccgccaccgtgcccagctaatttttgtatttttagtagagacggagtttcaccatgttggccgggctggtctcgaactcctgacctcatgatctgcctgcctcggcctcccaaagtgctgggattactgggttcccacaaattttaagacttacttcaggccaggtgtggtggcttatgcctgtaatcccagcattttgggaggccgaggtgggcagatcacctgaggtcaggagttcgagaccagcctggccaacatggtgaaacccctgcctctactaaaagtacagaaaattagctgggtgtggtcgcgcatgcctgtagttccagctactcaggaggctgaggcaccagaatcacttgaacctgggaggtggaggttgcagtgagctgagattgcgccactgtactccagcctgggcaacagagtgtctccccctcaaaaaaaaaaagacatacttcagagtgtggtgagctgcataaggctttagaggtaatgacattttgagatttcaattaaaaattttttttctactttttttttttgagacagagtctcactcttgctcaggctagagtgcagtggtgcgatcttggctcactgcaaccttcgcctcctggattcaagcgattcttgtgccttagcctcctgaggagctgagattacaggcacctgccaccatgcccagctaatttttgtatctttagtagagaagaggtttcatcatgttagccgggctggtcttgaactcctgacctcaggtgatctgtctgcattggccttccaaagtgctgagattacagatgtgagccaccgtgcctggccactttttttctacttttgctaatttttttaaagtttcatgaacattatagtactgtgttcataaatgaaaataaaagaaacttgctccagtcttgttcatcaagccgttcttgaccttcacagtcagaatctcacccatcaccttgtcacatctccctcttgatctgtatatccagagtccacctgacatgcttcttcagccctccacatataataagaaatggttttgtgagccgagattgtgccattgcactgcagcttgggcaacagtgtgagactcctcaaaaaaaaaaaaaaagaaagaaaaatgcttttaggtgataaggaaatggagaagaataaaacatctttgccagtctttacctttttaatatcttgaattcatgatttcttgccatagccactatcctagtccaggctctctcccttctacccctgagttttttttttttttttttttaccatgtttttatttcctctgggaaaacacctatcagaattttgggatcatatgacagatacatatttaatttctttctttcttttttgagacagggtcttcctctgttgcccaggctggagtgtagtggtatgatcatggctcactgcagccttgaccccttcctcgcccccgctcaagtgatcctcccaccacagcttcctgagtagctgggactgccggcatgctccaccatgcccgactaacgttttgctgcttgtagagacagccatgttccctaggcttgtcttgaactcctgagcctcaagcgatccttccacttcagcctcaagtgctgggattacaggcgtgagccaccactcctggctacttaatttctttctttctttttttttgagacagtctcgttctgtcacccaggctggagtgcagtggggtgatctcttctcactgcagcctctaccttccaggctgaagcaagccttccacctcagccccctgagtagctaggactacgggaacattccaccaggcccagctaatttttgtattttttgtagagatggagtttcatgatgttggccaggctggtcttgaactcctcacctcatgcaatccgcctgcctcagcctcccaaagtgctgggattacaggtgtgagcaactgcacccagcgggccccgcccagacctattttcaaaattagaaaaccgtgaggcttctggaagaagatgagaagaatatcttcatgacctgagtgtgtgcaaaggtttcttagggctcaggatgccagagtcacttaaaaaagcaaaaaaaacccaaaaaaaaaaccacacacacaaagataaatatgattgattacatcaaaatgtaatcacagactactctaagaaaatgaatggggaaacacagggacctatttgacaaaagactgatattcaagataaataaagaactaataggccaggcgcggtggctcacgtctgtaatcctggcactttgggaggccgaggcggggggatcacttgagctcaggagttcgagaccagcctgagcaatatagtgaaaccccatctctactaaaaatacaagaattagaattagctgggcgtgatggcacgtgcctgtagtcccagttactcgggaggctgaggctggagaattgcttcagtcaggaagatggaggttgcagtgagccgagattgtgccactgcactccagcctgggcgactgaacaagacttcgtctcaaaaaaccagtagggctccaggcctgggattgggcctctgctgctctactccctggacgtgtggctccgtccttggagtcggcctttggttttcatgaagagtagtgtgcattaacagctgagtggttttatcagcctgtttcctgccaacagtgtatgagagttccagttgctttacatccttgccagcatttggtgttgtcagtcttttgagttattctgatgggtgtggtgtgtcatggtcttaattttagtcctcagtcactaatggtgtttagcactttttcctgtgcccatgacaatgtgcatcttcctttgtgaagtgcctgctcaaatcttttgcccattttacattgggttgtgtgtctttttattattgagttgtagcagttatttatataacctttatatcctggttacctgtcctctgtctggttgcctattcattttcttagagttgtctgatgaacagaagttttacattttgatgtaatcagttttctcttatattttcttttatagttactgctttctgagtcctaggaaatcttggctaccttcaggctgtgaagataatctttcatgttttcttctgtaagttttttttttttttgagacagagtcttgctctgtcgtccaggctggagtgcggtgatggcgatctccgctcactgcaacctctgcctcccaggttcaagcgattctcctgccccagcctcccgagtagctgggattacagacatgcgccaccatgcccaactaatttttgtatttttattagagacagggtttcaccaggttggccaggttggtcttgaactcttgaccttgtgatccacccgcctcggtctcccaacatgctgggattataggcgtgagccaccgtgcccggcctataaattttatagttttagttttatgtttaagcctatcacccatttctagtttaggtgaatggtgtgagatataattaaatattaatttcttttccatatagatatccagtcattccagcaccatttgttgaaaatgctattgtattgcgttttggaaattaagatgactgtacaaatggtaattgatgtctgcactcccttttctgttccattgttcaatccttgtgttagtaccacacttttaattactgtagctttttagtaagtcttgaagtcatgtagttgtaggtcttccaattttgttgttttcaagcttgatgtgaatattctaaatcctctgcatttccatataaatatcagaattatctttaccagttttacagaaaagtctggtaaagttgtgattgggattgcattgaatctatggatcaatttggaaagaaatgacacctaaacagtattgagtcttcaaatatatgaacttggtgcattttccttcttatttaagccttttaaaatttctttttaggccgggtgcagtggcttatgcctgtaatcccagcactttgggagtctgcagcgggcagatcagctgaggtcaggagttcgagaccagcctggccaacatggtgaaaccccgtctctactaaaaatacaaaaattagccaggtgtggtggcaggtgcctgtagtctcagctacttgggaggctgaggcaggagaactgcttgaacttgctcaggaggtggaggttgcagtgagctgagatagtgccattgcactccagcctgggcaacaagagcaaaactctgtctcaaaaaataataataataaaaataaaaattttgggccaggtgtggcggctcacacctgtaatcccagcaatttgggaggctgagccgggtggatcacctgaggtcaggagtttgagaccagcctgaccaacatggagaaaccctgtctctacgaaaaatacaaaatttgccaggcatggtggcgcatgcctgtaatcccagctactctggaggctgaggcaggagaatcacttgaacctgggaggcagaggttgcagtgagccgagatggtgccattgcactccagcctgggcaacaagagtgaaactctgtctcaaaaaaaaaaaattcttttagttctgttttatggttttcagttcagaagtcttatacatattttgttaaattgatttctagatatgtttcttacctttattgtaaaatggagccatcatttgcatcattcattactctgtatgtaatgtgttatcattctctacctgctttcaagattttctctttatttttgttttttagcagtttgtctgtggtgtatctaggtgtcattttatttgtatttatccggagatttattcttgagatttgcagagcttcttaaatctgtaaatttatgtctgtcggccaatttgggaaatttggagctattagttttaaaaatatttcttctgttccattctctttcacttcttctgtatgtgagttcaatttcacttcaattgtatgtgagttagacattttgatattagcccacaggatcctgaggttctttcattcttttcaatcttttttttttctcgaagtttgcatttcgtgagcaggagtgacagtcattcaggatgatttttgagattcctagttcaagagtagttcctattcttttctaggtgtagtcaagtatggcttctaattctactagaaggcttttttgtcggggaggtggttctatgtcctttggctcttacattttctttgtgtctttcacagcacagttttcagagggtaccctttctctttggttttgttttgttttgttttgttttagacggagtcttgctctgtctccaggctggagtgcagtggcgcaatcttggctcactgcaacctctgctcactgctacctctgcctcccgggttcaagcaattctcctgcctcagcttcctgagtagctgggactacaggcacgcgccaccacacccaactaatttttgtatttttagtagagactgggtttcatcatgttggcaaggctgttctccatctcttgacctcgtgatccgcccgccttggcctcccaaagtgctaggattacaggcgtgagccaccgcgcccggccaacagagggtaccctttcattctttttctccttcttcccagaaggcttgcgttttcaagactacctcatcaagttctgcatgtgtttaaaagtgtctctacccgaccttcccttcctccctcccgatttaacggaattctttgttggtgttttcatacttaccgtgagttttctttttcagggtgatattttagttccatcttaggctctccattgtcctcttctctcttctttttttttttgagacagagtctcattctgtcacccaggctggagtgcagtggtgtgatctctgctcactgcaacctctgcctcccaggttcaagtgattctcctgcctcagcctcccgaatagctgggattacaggcgcacacaaccacgcccacctaatttttgtattttcagtagagacggggtttcaccatcttggccaggctggtctcaaactcctgacctcgtgatccgcctgcctcagcttcccagagtgctgggattacaggcatgagccaccgcgcccggtgcgcccagccctcttctctcttctttgcatctctcttcctatctggatccctctttgctgtccttaaagagctgagatgagagattgagaaacatctctacaagaaattgacgtttttctacttatgggtaattagaagcttgtagtattttcagtcttctaagtatgttgaagatatgagacgttggtgattttctttgtttctccggttggttggtctgtgtagtttttggacatgtgtttggatatttggatttatatagctgccataatcttggctatgcaggtagtctttcctgacacttcatcctgaaagatttgaagcctttggacaaattttacagtgggctgggtgcagtggctcacgtctgtaatcccagtgctttgggaggctgggcaggaagattgcttgagcccaggagtttgagaccagcctggacaacatagtgagacccgtgtctctacaaaaaataaaaaatatgccgtgtgtggcgttatacaactgtagtcccagctacttaggaggctgaggtgggaagatcacgagccaaggagtttgagggtacggtgagccatgatcgcctcactgcactgggtggcacagcgagactgtctcaaaaaaaaaatttacaattaatgtctgcatatccttcacctaggttcataaatttgtacttttgctttatctacttgcctttttctctctctctacacacacacacacacacacacacacacacacaattagttgaatgaattgagagtaagttgcagaaaacatgacactttactccaatattgcatcatacaaaatcatacatctagtgataggccattgtcctacagaatcacgatataattatcacactaaccagctgtggtggtgcacacctgtagtctaagctactcgggaggctgaggcagaaggatcacctgagcccaggaggttgtggctgcagtctcatattcatcccatcatcagatttctcccattgtcctaataatattctttatagcttttctttatccctgatccgaaatttcattgaagatcacacagtgcatttagttgtcatgcctcttaagtctttatttatttattatttattttttgagatggagtcttgctctgttacccaaactggagtgcagtggcatgatcttggctcatgcaacctccacccgctgggttcaagtgattatcctgcttcagcctcccgtgttgctgggactacaggtgtgtgccaccatgcccagctactttttatatttttagtagagacgggaattgtaccatgttggccaggctggtcttgaactcctgagctcagatgatccacccgccttggcctcccaaagtgctgggattacaggcgtgggccaccacacccagccttaagcctcttttaacataaaagagttcaccagccattctattttgttttgctttttgagacactgatgctttggagagtccaggccagttgctttgtagatttcaacttgtttgattgtttcctgatgattaggttggtagaaatactacctcaatgatgggaccttcttagtgcgtccatcaggaagcacatgatgtgactgtaattggtgacattaagtttgattccttaataattaaggtggtaactcccaggtttctacattgtaaaggcatcttttgccgccctcctttttattcccaagtagtttatttggagattagtcctttacacagtagaggagcggggaagggagacaggaaaggaaagtttgacaacaaagggtgagttttcaagcctgttgccacgggggaacctaattccactggagaagctcatggcttggtgatgttccacagaggggtcagaaatttagcgtatttcaacaccagctcctgtcaggcaccatttgagggctgctgccagggtggttcaattttctggtgcttacagcttgccataaacaggtgcaaagtagtctggataccaaagaaagctctcaggtaacaagatgcagatgttggcatttggaagtcagaatagggtgcactattgtggtaagagctgaagggatggctgggcgcggtggctcacacctgtagtcccagcactttgggaggatgaggcaggcggatcacctgaggtcagaagttcgagagcagcctggccaacatgacgaaaccccgtctctactaaaaatacaaaaattagccaggcgtggtggtggatgcctgtaatcccagctattcagtaggctgaggcaggagaattgcttgaatctgggaggtgtaggttgcagtgagctgagatcacaccactctgcactccagcctgggtgacagagcgagactctgtctcagaaaaaaaaaaaagctgaagggatgctgagtagagcatccgtagtgtctgctatacctgggtaccctagaacctggagaacctacagcttgaggcaagagcgtatgtgctattattttttcaagaagtgtgctctcaggaagcagaggtaggggaaaggtgagtgaagggagaaggaagattaagtcagttcaagggtgcattttgaagttggttgcccttggtgcaagtacagttggttgcttgttctcctaaagctgtctcccaggaggatgtatacataactgcattccagggcaatccatctaaaggaagggtggacggacccctcagcttctgtatctcactggaaaaaggtttgcttcatggcacattaattcccatagacttctaggttgtgcatgtgtgggtaccaggtgggtcccacagacccttacacctccaaggcaagcagcaagccacgggtgggaagtgataggtacccagtatgagcaggaggtaagggaccgtggggttgtgcctgtgggcagttggttataacccagacgtgtttgatcagcccagtgacagctggagtggacaaagtgaccaagggcctcaaggacacacaaggccaagaagatttgaagtgctgtgtaagatatgcctaatgcatttggattctacctttgtttaacgaatatgcacacataaaaaacacttgaactccttgagcccaggagttcaagaccaacctgggcaacatagtgagacactcatctctaaaaaaattttaaaaaaaattaacctggcatgatagcactcacctgtagtcctgtctactctggaggccgcagtgggaggatcacctgagccctggaggtcaaggttacagtatgctatgattgcaccactgcattccagcctgggtaacagagcaagacgctgtctcttaaattttttttttttttttttttacttttataatggaaaaaccattgtagacagttttaggaaggaaagcagaatagtaagacatctttttcaaagtaaaagagcaaaaaaggcaaaaaatatttcacatttactttatggacaaagataagattgtccttcaataaaagactgaattttttttgtttgttttgttttgttttttgagaaagagtcttgctccattgcccaggctggaatgcagtggtgtggtctcggctcactgcaacctccgcctcccgggtacaagcaattctccagcctcagccccccgagtagctgggactacaggcacgcgccactgcatctggctaagttttgtatttttagtagagatggggtttcaccatgttgaccaggctcgtcttgaactcctgacctcaggttatccacctgcctgggcctcccaaagtgctgggattacaagtgtgagccaccgtgcccggccacaagttgctctttaaatgtgagaagtgttctggcatggtggctcacacctgaggcgggtggatcacttgaggtcaggagttcgagatcaggctggccaacatggtgaaaccccgtctctagttatttatttatttatttatttatttatttatttatttatttttttgagacggagtttcactcttgtttcccaggcgggagtgcaatggcgcaatctcggctcactgcaacctccgccttccgggttcaagcgattctcttgcctcagcctcctgagtagctgggattacaggcatgcaccaccacacccggctaattttgtatttttagtagagacggggtttttccatgttggtcaggctggtctcgaattcctgacctcaggtgatctgccctcctcagcctcccgaagtgttgggattacaggcgtgagccaccacgcccggccctgtctctactaaaaatgcaaaatttagccgggcatggtggcgcacacctgtaatctcagctactcaggagactgaagcagcagattcgcttgaacccaggaggtgaaggttgcagtgagctgagaccacaccactgcagggcagcctaggcgacaagagcgaaacgcttacaaaaaaaaaaaaaaaaaaagattcacaggtgatggtgatgctgctggttaaggaagtgaagtggctttttgctctgtagccttcctgaatgttggggcctcctgctcttcatttgtttcatttctattaagtctcctccctccagctatcttgttagctcctggaaagcatttcagtgattgtggcttctatttctttttgaccccacagtgtccagggtcatgctgcctatatagtagtgagcagtaagttgaggtttttaaaaactttattattattatttttgagatggagtcttgttctgtcacccaggctggagtgcagtggcacaatctcagttcactgcaacctctgcctcccaagttcaagtgattctcctgcctcagcctcccgagtagctgggactacaggcgcctgccaccacatccggctaatttttttgtatttttagtacagatggggtttcactatgttggtcaggctgatctcgaactcctgacctcaggtgatccgcctgctttggcctcccaaagtgttagggttacaggtgtgagccaccacacctggccggtttttttaaactttaaaacagattcacttgatttttcttccctaccccccagcttttttgaggtatgactgacaaaaattgtatatatttagggtgtacaatgtgatgatttgatatgtgaatgcactgtgaaatgattaccacagtcaaggtaattcacatatccaccacctcccagttaccctcttagctagtacaggttgggtattgcttctctgaaatgctttgggaccagaagtgttttggacttcagattttggaatatttgaatatatataatcagatatcttgggaaggggacccaagtctaaacatgaaattcatttgttttcagagcctaaagatgatttttttttttttttttttttgagatggagtctcactctcgcccaggctggagtgccgtggcacaatctcagctcactgcaacctctgcctcccaggttcaagcgattctcctacctcagcctcccaagtagctggaattacaggctcgcactaccacacccggctaatttttgtatttttataaagacatttcaccatgttggccaggctggtctcaaactcctgacctcaggtgatccgcccgcctcagcctcccaaagtgctgggattataggtgtcagtgactgcgtctggctgataattgaatttttctcttggagaagctgaataaactgtgtgttgtgtgcctgcctttttttttgtttttttttttttttgagacagagtcagacactctgtcacccaggctggagtgcgatggggtggtcatagctcactgcagcctcaaactcctgagctcaagcgatcctcccacatcagcctcctaagtagcatagcaccacgcctggctaatttttaaattttttgtagtgatggggttttgttgtctaggctagtctcaaactcctgggctcaagcagtccttctgccttggcctcccaaggtggtaggattataggtttgagccaccatgcctggccattacctgtgttttgactataacacatcatgttggcactcaaaacgttttggattttggagcattttgaattttggatttttggattagcaatgttccacctatagtacattttttgtttgctttcccataaagaattttttgtaattttgattttatagttctaaatgtaatatattcttattgtaaaaatcacctttaatagcaccgccagaatagcaaacatgttaacagaaaggtagaagtagaccttaaagaatcttcagcagcttgagagaccacagctaaccactgaggaactctgttctggattggagcagtgcttagaagcttataaataactcttagggtattgcatagggattctttttttttttttttcctgaaatggagtctcgctctgtcgcccaggctggagtgcagggtgtgatctcagatcactgcaacctccgcctcctgggttcaagcaattctttgcctcagcctcccgagtagctgggattacaggcgcctgccaccatgcccagctaatttttttggatttttagtagagagggggtttcaccatgttagccaggatggtctccatctcctgaccttgtgatccacccacctcggcctcccaaagtgctgggattacaggcatgagccactgtgcctggccgcataaggattctttatgtgatttttcagtagaggctcttgccttttactttaaacattctttgagggttgttttttttttccgctttttatttatatagaggtcaaccagaatcaagatgtctgggactgaggaagcaattcttggaggacgtgacagccatcctgctgctggcggcggctcagtgttatgctttggacaggtaactgtggttccttcatgccgggaaagaatgaggtgaagtgagtaaagttagggcaaggcagtttgtagagcatcgtagtacatgtgtgagcagtacctagtacgtttacctagtacgtgtgtgagcagtacctagtacgtttacctagtacgtgtgtgagcagtacctagtacgttgacgcggtgcgtgcgggggcagtacctagtacgtttacatagtacatgtgtgagctatttgttattggtttttcctttagatgcattttttgggagtcttgtgaactctggagggcattttggaatgttagctatcaaaagactgatagtactggggattagatttagattttaaattttttgtggggggggatagataacatatttgtatgacatcaaattcaaaatgaaactgtgaaaatctccctatttcctattgcccctgtgtgcatgccacccagttctatttcttttttttttcgagactgagtcttgctttgtcacccaggctgcagtgcagtggtgcgatctcagctcactgcaacttccaccctctggattcaagcaattctcctgcctcagcctcccaagtagctgggataacaggcatgcaccaccatggccagctaatttttatatttttagtagagatggggtttaaccatgttggccaggctggtctcgaactcctgacctcaggtgatccgcctgcctcggcctcccaaagtgtttggattacaggcgtgagccaccacgcccgggcttaatttttttgtatttttagtagagatgtggtttcaccatgttggccagggtagtcttgaactcctgacctcgtgatctgcctgcctcggcctcctaaatgctggaattacaggcatgagccaccgcgcctggctccagttgtctttcttggaggcatggaaagttactgggggtcctattccttgtagggacattgtgtgcacagaaaagagtttcttgctttgtccacccaaactccatctttgtctttagcagagagttgtgagtattcatctcatctgagcagggcaagggggacaaaacccaaatcagcaagcagtagtgtgtttctgtttgtgcaggatgggaaattgttgtattggagaaggcgtcaatctctggaaaggacaaatggaagcaaggcttcctacccccgtgctctttccgtacttgcttcctgtgctgacgtcatttacagatctggaggcagaacattttagcttcctaagcttcagaaacatttataaggatggtagcagcagctaaggcagcagttctcaaaatgcagttctcaaaaaccctggggtttctgaagatctttcagagtccagaaggtcaaaattatcttcataataatactatttgcctctttcacactcattgtctcatgagtgaatggtagagttttcagagagtgcatgatatgtggtgatgtcactgctatgatgcctaatggcatgcatgccttaaaagtttctcagttttgattcctaataggatacatagaacccacataaacaaaggttctggggggtctttttaagagtataaagtctccataaaggatggagactcaatgatgtgaggaatggtggaagtgtgaatttaattttcttttttggggttgcagtgccagtacacagcagaagagtaccaggccatccagaaggccctgaggcagaggctgggcccagaatacataagtagccgcatggctggcggaggccagaaggtaggagaattcatgtgcctggaaagcaggcatccataccgcagactccgatggtcttgccagttccctctctgggtcctcagggattcggaagtctgctgttaactgttcctggaggtctcccagtgcccctgggaggggatgggttccagacttcattctcatccgaaggggcctgggcatggtcttgacactcgcataaccgccgtcttaagatttttacatcatctttttttttttttatttttaaagacagggtcttgctctgtcacctaggctggagtccgaccagtggtgtcatctcagctcactgcagcctccacctcccaggctcaagcgatcctcctgcctcagcttcctgactagctgggactacaggcacacgccaccacacctggttaattttttaatgttctgtagagacgacatctcgccatgttgcccaggctgatctcgaactgctgggctcaagtgatcctcccacctcggcctcccaaagtgctgggattacaggtgtgggccaccatgcccagcctttacaccattaaaaaaaaaatgttccttttgccatttgctttttttttttaattaaacactttttaaagaacttatgattgacacataataattgcatatcatttgcttctaattttaacttctgtgtatatttttggtcttccataaaatatgtcaaacagatttgtactttttgcaaactgaattttagcaactgctgggtgagttcctcctcccaacagaccattcgttctcgcgggctccatctagaagatttttgaaataaattcattgagaattttcttgaaaaaaaaattttttttaacagactggttctcactctgtcacttaggctggagtgcagtggcacgatcctagcttactgcagccttgagctcctgggctcaagtgatcctcccacctcagcctcccgagaagaatgtttaaggacagtttatcgaaaaaagtagatgaggaataaattatgtcaattttgattcacatttaagtgtggtaaggaattaacacagcttttccttaaaaacatttgtttttctaggtgtgctacattgagggtcatcgggtaattaatctggccaatgagatgtttggttacaatggctgggcacactccatcacgcagcagaatgtgggtgagtatgctctccagcagtggggacttctgcactgtccagctcctgctgaaagtctgctgtgggtgaggaggtaaggtaggtggactcagctgccagcaggaggaatggttgtggcccagcggtcagtgtcctcttcaacttgctctctttcccactcctagattttgttgacctcaacaatggcaagttctacgtgggagtctgtgcatttgtgagggtccagctgaaggtgaggggatggagtagacctgctgcccggaaggatcagtgggtggtaggagaaggtgagcaggtagggaagtaggtagctggacggggacccaggctccagagttgtgtctcagccagcgttccctagagtggtggaattcaaatactcttgctcatgtgctccctaaaagaatggaaaaactgttctcttgcacatgttcaagctgacacctaaaagttttcaccatatataaaaattgttgcaaaggatgtattttttggcatatggtaaaatctgacattttaaaatacaataattttaccatcactgataagtgtttggaaactcaactttaggcaaagcaggtccttttgttataacattgatgaaaacaaaaatatgttttgttaataagttgtttcacttcaagtcacagttatttaaggtgttaagtgagcacttaccgtaaatctgttgaatcttgttaaatattccagtggactctaaatactatagaggataagatctatcatttatttgaagaaatacaatgaacaagcttttttttaatcattagaaattttacattgttctttctttatctgaactcatatttctattctatttccccactggttttaatcctaatacatatttatggttgaaagtttggctaggcggggtggctcattcgtgtaaccccagcactttgggaggcccaggtggaaggactgcttgagcccagggatttgagaccagcctgggcaacatagcgaaagcccgtctctactaaaaatacaaaaaattagctgggcatggtggtgtatgcttgtagtcctagctactcaagaggctgaggtgggaggatcacctgagcccaggaagtcgaggctgtggtgagctgtgattgcgccactgaactcctgggtggaaaaaaagaaaagttttatcggtagccttactgtgcttctctgcctttgcctgtgtataaaaataaaaatttttggtaaattttcagtgcacttaaggctctaaatattaaaatatttcttttggatttagttatattatagctactgttaacacacaattgaccagacaattgtgtttatggtgaagagaaaacataaatacagcaaaattttgatacttagaaaaattaaagatatgaaatcttgccacaaaaataaaaaatttaaaatataaaatttatggaaaatgtatatcttaatgagatggatggtgctgttttttcttttcagttagtttatatatccatatatccataactgaatattacttacttcttttttttttttgagatggagttttgctcttgttgcccaggctggagggcaatggttcaatctcagctcaccgcaacctccacctcctgggttcaagcgattctcctgcctcagcctcccaagtagctgggattacaggcatgcgccaccccgcccgcctaattttttgtgtgtgttttcagtagagacgcggtttctccatgttggtcaggctggtctggaactcacaacctcaggtgatccacccgccttggcctccaaaagtgctgggattacaggcgtgagccaccgcacccggcctacttatttcttgaatgaacaattcagcattaattctattctgacttatttttctaaatagtactaaaaaatcttgtatctatgagtgagtagctgagaatggaaagaattgtgttatagtgtcactcatttatttgagtgctttctgagttattttttaaaaatcacagagcgctgtcatcaaacattgtatttaattctcaatcagcgaatgatgtgctcaggtccaccttctcttttggtgagaggcaggagctggacgccacctgatttacaaagggtttgctctcccgtccttacagaccattagatccagtgttcaaatcatccctttgtttcatatcccagaggtttttttttttccaagacgtagtctcactctatcacccaggctggagtgcagtggtgcaatctcggctcactgcaacctctgcctcccaggttcaagtgattctcctgcctcagtctcctgagtagctgggattacaggtgcccaccaccacacccggctaatttttgtatttttagtagagatagggtttcaccatgttgaccaggctggtcttgaactcctgacctcaagtgatccacctcccttgacctcccaaagggctgggattacagcgtgagccaccacgcccggcccggccatcccagaggttttttttaccttagggtgatgcacactgataggatttggggtgagtttctaatgtgccctttgtgtgttgggaagttgggaagggaggatcgtcttgacaccttgaccgcaggcacatgtccaggcagcccaggtctaggaagcagcactcgcgatggattctcacccagccttctgcccgtgcccctgtagcaaggccgccaggtgggagagtccggctttgaaccctgctgcttgaggaacaggggagttgtggcacgcctgccgctctcgtgtttgagttcaaactccttttctgcccccaggatggttcatatcatgaagatgttggttatggtgttagtga

SEQ ID NO: 13663 - DNA, 633 bp, Homo sapiens
gtgtgcaccgcgcgctgcccgaggcgcgtaagtgggggaggagagcggcttcccccggggtggttctagccgtgggtgtggagcgtgggaaggctcagcttccgggtcgagaacctggggctgcggtggacctgatcctgaggtctcagcgtagagatgctgagtccagaggcctgttctagttcaccagtgcagtgaggggctcagtatccgggcctcccgagagaggtcaaccagaatcaagatgtctgggactgaggaagcaattcttggaggacgtgacagccatcctgctgctggcggcggctcagtgttatgctttggacagtgccagtacacagcagaagagtaccaggccatccagaaggccctgaggcagaggctgggcccagaatacataagtagccgcatggctggcggaggccagaaggtgtgctacattgagggtcatcgggtaattaatctggccaatgagatgtttggttacaatggctgggcacactccatcacgcagcagaatgtggattttgttgacctcaacaatggcaagttctacgtgggagtctgtgcatttgtgagggtccagctgaaggatggttcatatcatgaagatgttggttatggtgttagtga

SEQ ID NO: 13664 - DNA, 1243 bp, Homo sapiens
tctcttccccttgtccatagcctagatcgagctccctgtgtgcaccgcgcgctgcccgaggcgcaggtcaaccagaatcaagatgtctgggactgaggaagcaattcttggaggacgtgacagccatcctgctgctggcggcggctcagtgttatgctttggacagtgccagtacacagcagaagagtaccaggccatccagaaggccctgaggcagaggctgggcccagaatacataagtagccgcatggctggcggaggccagaaggtgtgctacattgagggtcatcgggtaattaatctggccaatgagatgtttggttacaatggctgggcacactccatcacgcagcagaatgtgggcttcccttgctgggagtaagtggtagaatcctgtactctctcttctccgtgcactcagtcatgtgtgccggaggccttcccactcctactgcgagtgcacagacagcaccctcctctccgtgctcctcagcagtcctccgctacgcacaggagttttgggaatgcacttggaaactgtattctggacaaagactacctgagatcactaaataagcttccacgccagttgcctcttgaagtggatttaactaaagcgaagagacaagatcttgaaccgtctgtggaggaggcaagatacaacagctgccgaccgaacatggccctgggacacccacagctgcagcaggtgacctccccttccagacccagccatgctgtgataccggcggaccaggactgcagctcccgaagcctgagctcatccgccgtggagagcgaggccacgcaccagcggaagctccggcagaagcagctgcagcagcagttccgggagcggatggagaagcagcaggttcgagtctccacgccgtcagctgagaagagtgaggcagcgcctccggcccctcctgtgacgcacagcactcctgtaactgtctcagaaccactcctggagaaagacttccttgcaggagtgactcaagaattaatcaagactcttgaagacaactctgaaaagtgggctgtgactcccgatgcaggggatggtgtggtcaagccctcgtctagagcagacccagcccagacctctgacacattagccttgaacaaccagatggtgacccagaacaggactccacacagcgtttgccaccagaaaccacaagcaaaatctggatcttgggacctccaaacttatagcgctgaccaacgcacaacaggt

SEQ ID NO: 13665 - DNA, 19720 bp, Homo sapiens
atagcctagatcgagctccctgtgtgcaccgcgcgctgcccgaggcgcgtaagtgggggaggagagcggcttcccccggggtggttctagccgtgggtgtggagcgtgggaaggctcagcttccgggtcgagaacctggggctgcggtggacctgatcctgaggtctcagcgtagagatgctgagtccagaggcctgttctagttcaccagtgcagtgaggggctcagtatccgggcctcccgagaggtgggtaggaaggcggggtacaggaaacttggcaccaacgcgccgggaccccaccgcggtgcggacagccaggtgtccgtggtggcgcttccttggagatgctgcctgcagacaggcgtggggaatctgaagtttgtgttaatagctaaacgaagttgagttgcagggagcgggggacgctgggaagaaatgattgatttaaaaggaatttgacgccgggcatggtggcggcatgcccccatgttccctggaggtcaagcctgcagtgagccgagatcgcacccgtaccacgacactccgtcccgggcgacagagcgagaccctgtcacgggggaaaaaataaaaataaaaatttgacgctcactttagctgagtattgagccttgttataacattgagatagaggtctggcgcggcgtctcacacctgtaatcccagaactttggaaggccgatgcgggaggatcgcttgaggccaggagttctacgccagcctggctaacatagcgaaaccccgtctctactaaaaatacaaaactaggcaggcctggtggcgggcgcctgtaatccccgctactcgggaggcggaggcatgagaatcgcttgaacccagtaggcaggtgtgccggtaagccgacatcgcaccactgcactccagcctgggggacagagcgagaatccatccaaaaaaaaaaaagttataattcacgtacaattaaattcactcccttttttaaaaaaaagtggagacatagtctcgctctgttgcccaggctggagtacagtggcgccgtctcggctcactgcaacgtccgcctcctgggttcaagcgattctttgcttcagcctctcaagtagctggaattacaggcgcataccaccacacccagctactttgtatttttcaccatgttggttaggctggtctcgaactcctcgcccttccaaagttcagggattacaggtgtgagccaccacacccagtctaaattcacccttttaaagtgtgcaattcagtggttttaatatattcacaaggttgtgcaatcaccactattatctaattccagaacatttttatcatccctaaaagaaaccttaaaaccattagcagacacccattatttcctcctactcccagcagcactaatctatgaatttacccattctcagtactgtattatacaatatttgttcttttgtgtttggtttatttcacttcatgattcaaagtccatctatgttgtatgtagcatgtatcaacttcattttttaaataactgaattatttattgtgtggatataccacattttgtttctccatttttgatggatactggtgattttctaggctttctaggtctagtcctccacagaactcgcagtctgaggcacagacatttaaaacttaagtttttggaaactagcatttaactcttgggttgggtcaggtaattcagtggcctcaggtctggtatcgtttagggcagttttttttttgttttttttttttttttgagatgaagtttcactcttgttgcccagggtggagtgcaatggcgtatctgggctcactgcaacctcacctcctgggttcaagcgcttctcctatctcagcctcctcggtaactgggcttacaggcgcatgccactatgcccggctaatttttggtatttttagtagagacagggtttcaccatgttggccatgctggtctcgaactcctgacctcaggtgatccacccatctcggcctcccaaagtgctgggattacaggtgtgagccaccgcgcctgggtgggagttttgtttttttgtttgtctgttgttttttggggggacagagtttctctcagcctcctcggtaactgggcttacaggcgcatgccactatgccaggctaatttttggtatttttagtagagacagggtttcaccgtgttggcaatgctggtctcaaactcctgacctcaggtgatccacccgcctcggcctcccaaagtgctgggattacaggtgtgagccaccacacctgggcgggagttttgtttttttgtttgtctgttgtttttttggggggacagagtttcgctcttgttgcccaggctggactgcagtggcgagatcttgactcactgccacttctgcctcctggattcaagcgattctcctgcctcagcctcccgagtagctgggattacaggtgtgcaccaccacacccggctaattttgtatttttagtagagaaggggtttctccatgttggttacgctggtctcgaactccctacctcaggtgatcctcccgccttggcctcccaaagtgttgggattacaggcgtgagccactgcgcccctctgggagtgttttttaaagtgttctattctcagttcaccacttaccaggccgttaattatcgtggtatcaagcagagaaatgtttgtgtgctggtcttctcagggaggcagaaaccgtcagagattgctgttgtgtaatgtacaccaaaacgtgttatcttgtagtataaacggtgtagttggagatgagtgtatgaaaaatgtaactgagctagctgtgggagagactagttgtgaaaaattttgagtcacccactgtatgctttcccagctatgttcaaataaggtgacactctgccttcctgtttcagctctaaaactgttcataagtgttattttggctgtatacgtagtgccatgtttttttgtatttttgtgcttttggtgattttgctgtttataggggcctccaagaatagaagtgctgtctagcatttccaagttgaaggctgtgatatatcttatagagaaaagataagcttttagattagctttgttcaggcatcacttttgttgttggctgtgagttcatgttactgcatcaacaatatatattaaataagatatctttaaacagaagcacacataaaacaaggttatgtattggcctgttgagtaaccctgtatttcccctgggagcagtggctcagtatttgctagttcagtgttcatgatggctttacaggacataactaccctgaataatgagaactgactgtctcagtagtgcttcaagggcagaaagcctagtggatatttttccatctctgcagcttttagcatttcttcactcaaggcactcatttttaatattgaactggcagttttgatgtggagagaagctaaaataaggctaaaatgctcttcatactatgtgctgagtggggactgtgctgagtgttggggattcagtgattagtgtatggccccgcagttctctaatggctgagtgtgggagtgcagagaaatgatcagtgtgagggaattaatcctatgttcccaccgtgtttttttgttttttttgagacggagtttcactcttgtcgcccaggctggagtgcggtggcgtgatctcggctcactgcaacctccgtctcccaggttcaagcgattctcctgcctcaacctcccgagtagctgggattacaggtacccgccaccgtgcccagctaatttttgtatttttagtagagacggagtttcaccatgttggccgggctggtctcgaactcctgacctcatgatctgcctgcctcggcctcccaaagtgctgggattactgggttcccacaaattttaagacttacttcaggccaggtgtggtggcttatgcctgtaatcccagcattttgggaggccgaggtgggcagatcacctgaggtcaggagttcgagaccagcctggccaacatggtgaaacccctgcctctactaaaagtacagaaaattagctgggtgtggtcgcgcatgcctgtagttccagctactcaggaggctgaggcaccagaatcacttgaacctgggaggtggaggttgcagtgagctgagattgcgccactgtactccagcctgggcaacagagtgtctccccctcaaaaaaaaaaagacatacttcagagtgtggtgagctgcataaggctttagaggtaatgacattttgagatttcaattaaaaattttttttctactttttttttttgagacagagtctcactcttgctcaggctagagtgcagtggtgcgatcttggctcactgcaaccttcgcctcctggattcaagcgattcttgtgccttagcctcctgaggagctgagattacaggcacctgccaccatgcccagctaatttttgtatctttagtagagaagaggtttcatcatgttagccgggctggtcttgaactcctgacctcaggtgatctgtctgcattggccttccaaagtgctgagattacagatgtgagccaccgtgcctggccactttttttctacttttgctaatttttttaaagtttcatgaacattatagtactgtgttcataaatgaaaataaaagaaacttgctccagtcttgttcatcaagccgttcttgaccttcacagtcagaatctcacccatcaccttgtcacatctccctcttgatctgtatatccagagtccacctgacatgcttcttcagccctccacatataataagaaatggttttgtgagccgagattgtgccattgcactgcagcttgggcaacagtgtgagactcctcaaaaaaaaaaaaaaagaaagaaaaatgcttttaggtgataaggaaatggagaagaataaaacatctttgccagtctttacctttttaatatcttgaattcatgatttcttgccatagccactatcctagtccaggctctctcccttctacccctgagttttttttttttttttttttaccatgtttttatttcctctgggaaaacacctatcagaattttgggatcatatgacagatacatatttaatttctttctttcttttttgagacagggtcttcctctgttgcccaggctggagtgtagtggtatgatcatggctcactgcagccttgaccccttcctcgcccccgctcaagtgatcctcccaccacagcttcctgagtagctgggactgccggcatgctccaccatgcccgactaacgttttgctgcttgtagagacagccatgttccctaggcttgtcttgaactcctgagcctcaagcgatccttccacttcagcctcaagtgctgggattacaggcgtgagccaccactcctggctacttaatttctttctttctttttttttgagacagtctcgttctgtcacccaggctggagtgcagtggggtgatctcttctcactgcagcctctaccttccaggctgaagcaagccttccacctcagccccctgagtagctaggactacgggaacattccaccaggcccagctaatttttgtattttttgtagagatggagtttcatgatgttggccaggctggtcttgaactcctcacctcatgcaatccgcctgcctcagcctcccaaagtgctgggattacaggtgtgagcaactgcacccagcgggccccgcccagacctattttcaaaattagaaaaccgtgaggcttctggaagaagatgagaagaatatcttcatgacctgagtgtgtgcaaaggtttcttagggctcaggatgccagagtcacttaaaaaagcaaaaaaaacccaaaaaaaaaaccacacacacaaagataaatatgattgattacatcaaaatgtaatcacagactactctaagaaaatgaatggggaaacacagggacctatttgacaaaagactgatattcaagataaataaagaactaataggccaggcgcggtggctcacgtctgtaatcctggcactttgggaggccgaggcggggggatcacttgagctcaggagttcgagaccagcctgagcaatatagtgaaaccccatctctactaaaaatacaagaattagaattagctgggcgtgatggcacgtgcctgtagtcccagttactcgggaggctgaggctggagaattgcttcagtcaggaagatggaggttgcagtgagccgagattgtgccactgcactccagcctgggcgactgaacaagacttcgtctcaaaaaaccagtagggctccaggcctgggattgggcctctgctgctctactccctggacgtgtggctccgtccttggagtcggcctttggttttcatgaagagtagtgtgcattaacagctgagtggttttatcagcctgtttcctgccaacagtgtatgagagttccagttgctttacatccttgccagcatttggtgttgtcagtcttttgagttattctgatgggtgtggtgtgtcatggtcttaattttagtcctcagtcactaatggtgtttagcactttttcctgtgcccatgacaatgtgcatcttcctttgtgaagtgcctgctcaaatcttttgcccattttacattgggttgtgtgtctttttattattgagttgtagcagttatttatataacctttatatcctggttacctgtcctctgtctggttgcctattcattttcttagagttgtctgatgaacagaagttttacattttgatgtaatcagttttctcttatattttcttttatagttactgctttctgagtcctaggaaatcttggctaccttcaggctgtgaagataatctttcatgttttcttctgtaagttttttttttttttgagacagagtcttgctctgtcgtccaggctggagtgcggtgatggcgatctccgctcactgcaacctctgcctcccaggttcaagcgattctcctgccccagcctcccgagtagctgggattacagacatgcgccaccatgcccaactaatttttgtatttttattagagacagggtttcaccaggttggccaggttggtcttgaactcttgaccttgtgatccacccgcctcggtctcccaacatgctgggattataggcgtgagccaccgtgcccggcctataaattttatagttttagttttatgtttaagcctatcacccatttctagtttaggtgaatggtgtgagatataattaaatattaatttcttttccatatagatatccagtcattccagcaccatttgttgaaaatgctattgtattgcgttttggaaattaagatgactgtacaaatggtaattgatgtctgcactcccttttctgttccattgttcaatccttgtgttagtaccacacttttaattactgtagctttttagtaagtcttgaagtcatgtagttgtaggtcttccaattttgttgttttcaagcttgatgtgaatattctaaatcctctgcatttccatataaatatcagaattatctttaccagttttacagaaaagtctggtaaagttgtgattgggattgcattgaatctatggatcaatttggaaagaaatgacacctaaacagtattgagtcttcaaatatatgaacttggtgcattttccttcttatttaagccttttaaaatttctttttaggccgggtgcagtggcttatgcctgtaatcccagcactttgggagtctgcagcgggcagatcagctgaggtcaggagttcgagaccagcctggccaacatggtgaaaccccgtctctactaaaaatacaaaaattagccaggtgtggtggcaggtgcctgtagtctcagctacttgggaggctgaggcaggagaactgcttgaacttgctcaggaggtggaggttgcagtgagctgagatagtgccattgcactccagcctgggcaacaagagcaaaactctgtctcaaaaaataataataataaaaataaaaattttgggccaggtgtggcggctcacacctgtaatcccagcaatttgggaggctgagccgggtggatcacctgaggtcaggagtttgagaccagcctgaccaacatggagaaaccctgtctctacgaaaaatacaaaatttgccaggcatggtggcgcatgcctgtaatcccagctactctggaggctgaggcaggagaatcacttgaacctgggaggcagaggttgcagtgagccgagatggtgccattgcactccagcctgggcaacaagagtgaaactctgtctcaaaaaaaaaaaattcttttagttctgttttatggttttcagttcagaagtcttatacatattttgttaaattgatttctagatatgtttcttacctttattgtaaaatggagccatcatttgcatcattcattactctgtatgtaatgtgttatcattctctacctgctttcaagattttctctttatttttgttttttagcagtttgtctgtggtgtatctaggtgtcattttatttgtatttatccggagatttattcttgagatttgcagagcttcttaaatctgtaaatttatgtctgtcggccaatttgggaaatttggagctattagttttaaaaatatttcttctgttccattctctttcacttcttctgtatgtgagttcaatttcacttcaattgtatgtgagttagacattttgatattagcccacaggatcctgaggttctttcattcttttcaatcttttttttttctcgaagtttgcatttcgtgagcaggagtgacagtcattcaggatgatttttgagattcctagttcaagagtagttcctattcttttctaggtgtagtcaagtatggcttctaattctactagaaggcttttttgtcggggaggtggttctatgtcctttggctcttacattttctttgtgtctttcacagcacagttttcagagggtaccctttctctttggttttgttttgttttgttttgttttagacggagtcttgctctgtctccaggctggagtgcagtggcgcaatcttggctcactgcaacctctgctcactgctacctctgcctcccgggttcaagcaattctcctgcctcagcttcctgagtagctgggactacaggcacgcgccaccacacccaactaatttttgtatttttagtagagactgggtttcatcatgttggcaaggctgttctccatctcttgacctcgtgatccgcccgccttggcctcccaaagtgctaggattacaggcgtgagccaccgcgcccggccaacagagggtaccctttcattctttttctccttcttcccagaaggcttgcgttttcaagactacctcatcaagttctgcatgtgtttaaaagtgtctctacccgaccttcccttcctccctcccgatttaacggaattctttgttggtgttttcatacttaccgtgagttttctttttcagggtgatattttagttccatcttaggctctccattgtcctcttctctcttctttttttttttgagacagagtctcattctgtcacccaggctggagtgcagtggtgtgatctctgctcactgcaacctctgcctcccaggttcaagtgattctcctgcctcagcctcccgaatagctgggattacaggcgcacacaaccacgcccacctaatttttgtattttcagtagagacggggtttcaccatcttggccaggctggtctcaaactcctgacctcgtgatccgcctgcctcagcttcccagagtgctgggattacaggcatgagccaccgcgcccggtgcgcccagccctcttctctcttctttgcatctctcttcctatctggatccctctttgctgtccttaaagagctgagatgagagattgagaaacatctctacaagaaattgacgtttttctacttatgggtaattagaagcttgtagtattttcagtcttctaagtatgttgaagatatgagacgttggtgattttctttgtttctccggttggttggtctgtgtagtttttggacatgtgtttggatatttggatttatatagctgccataatcttggctatgcaggtagtctttcctgacacttcatcctgaaagatttgaagcctttggacaaattttacagtgggctgggtgcagtggctcacgtctgtaatcccagtgctttgggaggctgggcaggaagattgcttgagcccaggagtttgagaccagcctggacaacatagtgagacccgtgtctctacaaaaaataaaaaatatgccgtgtgtggcgttatacaactgtagtcccagctacttaggaggctgaggtgggaagatcacgagccaaggagtttgagggtacggtgagccatgatcgcctcactgcactgggtggcacagcgagactgtctcaaaaaaaaaatttacaattaatgtctgcatatccttcacctaggttcataaatttgtacttttgctttatctacttgcctttttctctctctctacacacacacacacacacacacacacacacacaattagttgaatgaattgagagtaagttgcagaaaacatgacactttactccaatattgcatcatacaaaatcatacatctagtgataggccattgtcctacagaatcacgatataattatcacactaaccagctgtggtggtgcacacctgtagtctaagctactcgggaggctgaggcagaaggatcacctgagcccaggaggttgtggctgcagtctcatattcatcccatcatcagatttctcccattgtcctaataatattctttatagcttttctttatccctgatccgaaatttcattgaagatcacacagtgcatttagttgtcatgcctcttaagtctttatttatttattatttattttttgagatggagtcttgctctgttacccaaactggagtgcagtggcatgatcttggctcatgcaacctccacccgctgggttcaagtgattatcctgcttcagcctcccgtgttgctgggactacaggtgtgtgccaccatgcccagctactttttatatttttagtagagacgggaattgtaccatgttggccaggctggtcttgaactcctgagctcagatgatccacccgccttggcctcccaaagtgctgggattacaggcgtgggccaccacacccagccttaagcctcttttaacataaaagagttcaccagccattctattttgttttgctttttgagacactgatgctttggagagtccaggccagttgctttgtagatttcaacttgtttgattgtttcctgatgattaggttggtagaaatactacctcaatgatgggaccttcttagtgcgtccatcaggaagcacatgatgtgactgtaattggtgacattaagtttgattccttaataattaaggtggtaactcccaggtttctacattgtaaaggcatcttttgccgccctcctttttattcccaagtagtttatttggagattagtcctttacacagtagaggagcggggaagggagacaggaaaggaaagtttgacaacaaagggtgagttttcaagcctgttgccacgggggaacctaattccactggagaagctcatggcttggtgatgttccacagaggggtcagaaatttagcgtatttcaacaccagctcctgtcaggcaccatttgagggctgctgccagggtggttcaattttctggtgcttacagcttgccataaacaggtgcaaagtagtctggataccaaagaaagctctcaggtaacaagatgcagatgttggcatttggaagtcagaatagggtgcactattgtggtaagagctgaagggatggctgggcgcggtggctcacacctgtagtcccagcactttgggaggatgaggcaggcggatcacctgaggtcagaagttcgagagcagcctggccaacatgacgaaaccccgtctctactaaaaatacaaaaattagccaggcgtggtggtggatgcctgtaatcccagctattcagtaggctgaggcaggagaattgcttgaatctgggaggtgtaggttgcagtgagctgagatcacaccactctgcactccagcctgggtgacagagcgagactctgtctcagaaaaaaaaaaaagctgaagggatgctgagtagagcatccgtagtgtctgctatacctgggtaccctagaacctggagaacctacagcttgaggcaagagcgtatgtgctattattttttcaagaagtgtgctctcaggaagcagaggtaggggaaaggtgagtgaagggagaaggaagattaagtcagttcaagggtgcattttgaagttggttgcccttggtgcaagtacagttggttgcttgttctcctaaagctgtctcccaggaggatgtatacataactgcattccagggcaatccatctaaaggaagggtggacggacccctcagcttctgtatctcactggaaaaaggtttgcttcatggcacattaattcccatagacttctaggttgtgcatgtgtgggtaccaggtgggtcccacagacccttacacctccaaggcaagcagcaagccacgggtgggaagtgataggtacccagtatgagcaggaggtaagggaccgtggggttgtgcctgtgggcagttggttataacccagacgtgtttgatcagcccagtgacagctggagtggacaaagtgaccaagggcctcaaggacacacaaggccaagaagatttgaagtgctgtgtaagatatgcctaatgcatttggattctacctttgtttaacgaatatgcacacataaaaaacacttgaactccttgagcccaggagttcaagaccaacctgggcaacatagtgagacactcatctctaaaaaaattttaaaaaaaattaacctggcatgatagcactcacctgtagtcctgtctactctggaggccgcagtgggaggatcacctgagccctggaggtcaaggttacagtatgctatgattgcaccactgcattccagcctgggtaacagagcaagacgctgtctcttaaattttttttttttttttttttacttttataatggaaaaaccattgtagacagttttaggaaggaaagcagaatagtaagacatctttttcaaagtaaaagagcaaaaaaggcaaaaaatatttcacatttactttatggacaaagataagattgtccttcaataaaagactgaattttttttgtttgttttgttttgttttttgagaaagagtcttgctccattgcccaggctggaatgcagtggtgtggtctcggctcactgcaacctccgcctcccgggtacaagcaattctccagcctcagccccccgagtagctgggactacaggcacgcgccactgcatctggctaagttttgtatttttagtagagatggggtttcaccatgttgaccaggctcgtcttgaactcctgacctcaggttatccacctgcctgggcctcccaaagtgctgggattacaagtgtgagccaccgtgcccggccacaagttgctctttaaatgtgagaagtgttctggcatggtggctcacacctgaggcgggtggatcacttgaggtcaggagttcgagatcaggctggccaacatggtgaaaccccgtctctagttatttatttatttatttatttatttatttatttatttatttttttgagacggagtttcactcttgtttcccaggcgggagtgcaatggcgcaatctcggctcactgcaacctccgccttccgggttcaagcgattctcttgcctcagcctcctgagtagctgggattacaggcatgcaccaccacacccggctaattttgtatttttagtagagacggggtttttccatgttggtcaggctggtctcgaattcctgacctcaggtgatctgccctcctcagcctcccgaagtgttgggattacaggcgtgagccaccacgcccggccctgtctctactaaaaatgcaaaatttagccgggcatggtggcgcacacctgtaatctcagctactcaggagactgaagcagcagattcgcttgaacccaggaggtgaaggttgcagtgagctgagaccacaccactgcagggcagcctaggcgacaagagcgaaacgcttacaaaaaaaaaaaaaaaaaaagattcacaggtgatggtgatgctgctggttaaggaagtgaagtggctttttgctctgtagccttcctgaatgttggggcctcctgctcttcatttgtttcatttctattaagtctcctccctccagctatcttgttagctcctggaaagcatttcagtgattgtggcttctatttctttttgaccccacagtgtccagggtcatgctgcctatatagtagtgagcagtaagttgaggtttttaaaaactttattattattatttttgagatggagtcttgttctgtcacccaggctggagtgcagtggcacaatctcagttcactgcaacctctgcctcccaagttcaagtgattctcctgcctcagcctcccgagtagctgggactacaggcgcctgccaccacatccggctaatttttttgtatttttagtacagatggggtttcactatgttggtcaggctgatctcgaactcctgacctcaggtgatccgcctgctttggcctcccaaagtgttagggttacaggtgtgagccaccacacctggccggtttttttaaactttaaaacagattcacttgatttttcttccctaccccccagcttttttgaggtatgactgacaaaaattgtatatatttagggtgtacaatgtgatgatttgatatgtgaatgcactgtgaaatgattaccacagtcaaggtaattcacatatccaccacctcccagttaccctcttagctagtacaggttgggtattgcttctctgaaatgctttgggaccagaagtgttttggacttcagattttggaatatttgaatatatataatcagatatcttgggaaggggacccaagtctaaacatgaaattcatttgttttcagagcctaaagatgatttttttttttttttttttttgagatggagtctcactctcgcccaggctggagtgccgtggcacaatctcagctcactgcaacctctgcctcccaggttcaagcgattctcctacctcagcctcccaagtagctggaattacaggctcgcactaccacacccggctaatttttgtatttttataaagacatttcaccatgttggccaggctggtctcaaactcctgacctcaggtgatccgcccgcctcagcctcccaaagtgctgggattataggtgtcagtgactgcgtctggctgataattgaatttttctcttggagaagctgaataaactgtgtgttgtgtgcctgcctttttttttgtttttttttttttttgagacagagtcagacactctgtcacccaggctggagtgcgatggggtggtcatagctcactgcagcctcaaactcctgagctcaagcgatcctcccacatcagcctcctaagtagcatagcaccacgcctggctaatttttaaattttttgtagtgatggggttttgttgtctaggctagtctcaaactcctgggctcaagcagtccttctgccttggcctcccaaggtggtaggattataggtttgagccaccatgcctggccattacctgtgttttgactataacacatcatgttggcactcaaaacgttttggattttggagcattttgaattttggatttttggattagcaatgttccacctatagtacattttttgtttgctttcccataaagaattttttgtaattttgattttatagttctaaatgtaatatattcttattgtaaaaatcacctttaatagcaccgccagaatagcaaacatgttaacagaaaggtagaagtagaccttaaagaatcttcagcagcttgagagaccacagctaaccactgaggaactctgttctggattggagcagtgcttagaagcttataaataactcttagggtattgcatagggattctttttttttttttttcctgaaatggagtctcgctctgtcgcccaggctggagtgcagggtgtgatctcagatcactgcaacctccgcctcctgggttcaagcaattctttgcctcagcctcccgagtagctgggattacaggcgcctgccaccatgcccagctaatttttttggatttttagtagagagggggtttcaccatgttagccaggatggtctccatctcctgaccttgtgatccacccacctcggcctcccaaagtgctgggattacaggcatgagccactgtgcctggccgcataaggattctttatgtgatttttcagtagaggctcttgccttttactttaaacattctttgagggttgttttttttttccgctttttatttatatagaggtcaaccagaatcaagatgtctgggactgaggaagcaattcttggaggacgtgacagccatcctgctgctggcggcggctcagtgttatgctttggacaggtaactgtggttccttcatgccgggaaagaatgaggtgaagtgagtaaagttagggcaaggcagtttgtagagcatcgtagtacatgtgtgagcagtacctagtacgtttacctagtacgtgtgtgagcagtacctagtacgtttacctagtacgtgtgtgagcagtacctagtacgttgacgcggtgcgtgcgggggcagtacctagtacgtttacatagtacatgtgtgagctatttgttattggtttttcctttagatgcattttttgggagtcttgtgaactctggagggcattttggaatgttagctatcaaaagactgatagtactggggattagatttagattttaaattttttgtggggggggatagataacatatttgtatgacatcaaattcaaaatgaaactgtgaaaatctccctatttcctattgcccctgtgtgcatgccacccagttctatttcttttttttttcgagactgagtcttgctttgtcacccaggctgcagtgcagtggtgcgatctcagctcactgcaacttccaccctctggattcaagcaattctcctgcctcagcctcccaagtagctgggataacaggcatgcaccaccatggccagctaatttttatatttttagtagagatggggtttaaccatgttggccaggctggtctcgaactcctgacctcaggtgatccgcctgcctcggcctcccaaagtgtttggattacaggcgtgagccaccacgcccgggcttaatttttttgtatttttagtagagatgtggtttcaccatgttggccagggtagtcttgaactcctgacctcgtgatctgcctgcctcggcctcctaaatgctggaattacaggcatgagccaccgcgcctggctccagttgtctttcttggaggcatggaaagttactgggggtcctattccttgtagggacattgtgtgcacagaaaagagtttcttgctttgtccacccaaactccatctttgtctttagcagagagttgtgagtattcatctcatctgagcagggcaagggggacaaaacccaaatcagcaagcagtagtgtgtttctgtttgtgcaggatgggaaattgttgtattggagaaggcgtcaatctctggaaaggacaaatggaagcaaggcttcctacccccgtgctctttccgtacttgcttcctgtgctgacgtcatttacagatctggaggcagaacattttagcttcctaagcttcagaaacatttataaggatggtagcagcagctaaggcagcagttctcaaaatgcagttctcaaaaaccctggggtttctgaagatctttcagagtccagaaggtcaaaattatcttcataataatactatttgcctctttcacactcattgtctcatgagtgaatggtagagttttcagagagtgcatgatatgtggtgatgtcactgctatgatgcctaatggcatgcatgccttaaaagtttctcagttttgattcctaataggatacatagaacccacataaacaaaggttctggggggtctttttaagagtataaagtctccataaaggatggagactcaatgatgtgaggaatggtggaagtgtgaatttaattttcttttttggggttgcagtgccagtacacagcagaagagtaccaggccatccagaaggccctgaggcagaggctgggcccagaatacataagtagccgcatggctggcggaggccagaaggtaggagaattcatgtgcctggaaagcaggcatccataccgcagactccgatggtcttgccagttccctctctgggtcctcagggattcggaagtctgctgttaactgttcctggaggtctcccagtgcccctgggaggggatgggttccagacttcattctcatccgaaggggcctgggcatggtcttgacactcgcataaccgccgtcttaagatttttacatcatctttttttttttttatttttaaagacagggtcttgctctgtcacctaggctggagtccgaccagtggtgtcatctcagctcactgcagcctccacctcccaggctcaagcgatcctcctgcctcagcttcctgactagctgggactacaggcacacgccaccacacctggttaattttttaatgttctgtagagacgacatctcgccatgttgcccaggctgatctcgaactgctgggctcaagtgatcctcccacctcggcctcccaaagtgctgggattacaggtgtgggccaccatgcccagcctttacaccattaaaaaaaaaatgttccttttgccatttgctttttttttttaattaaacactttttaaagaacttatgattgacacataataattgcatatcatttgcttctaattttaacttctgtgtatatttttggtcttccataaaatatgtcaaacagatttgtactttttgcaaactgaattttagcaactgctgggtgagttcctcctcccaacagaccattcgttctcgcgggctccatctagaagatttttgaaataaattcattgagaattttcttgaaaaaaaaattttttttaacagactggttctcactctgtcacttaggctggagtgcagtggcacgatcctagcttactgcagccttgagctcctgggctcaagtgatcctcccacctcagcctcccgagaagaatgtttaaggacagtttatcgaaaaaagtagatgaggaataaattatgtcaattttgattcacatttaagtgtggtaaggaattaacacagcttttccttaaaaacatttgtttttctaggtgtgctacattgagggtcatcgggtaattaatctggccaatgagatgtttggttacaatggctgggcacactccatcacgcagcagaatgtgggtgagtatgctctccagcagtggggacttctgcactgtccagctcctgctgaaagtctgctgtgggtgaggaggtaaggtaggtggactcagctgccagcaggaggaatggttgtggccca

SEQ ID NO: 13666 - DNA, 463 bp, Homo sapiens
atagcctagatcgagctccctgtgtgcaccgcgcgctgcccgagaggtcaaccagaatcaagatgtctgggactgaggaagcaattcttggaggacgtgacagccatcctgctgctggcggcggctcagtgttatgctttggacagtgccagtacacagcagaagagtaccaggccatccagaaggccctgaggcagaggctgggcccagaatacataagtagccgcatggctggcggaggccagaaggtgtgctacattgagggtcatcgggtaattaatctggccaatgagatgtttggttacaatggctgggcacactccatcacgcagcagaatgtgggtgagtatgctctccagcagtggggacttctgcactgtccagctcctgctgaaagtctgctgtgggtgaggaggtaaggtaggtggactcagctgccagcaggaggaatggttgtggccca

SEQ ID NO: 13667 - DNA, 7596 bp, Homo sapiens
atgtctgggactgaggaagcaattcttggaggacgtgacagccatcctgctgctggcggcggctcagtgttatgctttggacaggtaactgtggttccttcatgccgggaaagaatgaggtgaagtgagtaaagttagggcaaggcagtttgtagagcatcgtagtacatgtgtgagcagtacctagtacgtttacctagtacgtgtgtgagcagtacctagtacgtttacctagtacgtgtgtgagcagtacctagtacgttgacgcggtgcgtgcgggggcagtacctagtacgtttacatagtacatgtgtgagctatttgttattggtttttcctttagatgcattttttgggagtcttgtgaactctggagggcattttggaatgttagctatcaaaagactgatagtactggggattagatttagattttaaattttttgtggggggggatagataacatatttgtatgacatcaaattcaaaatgaaactgtgaaaatctccctatttcctattgcccctgtgtgcatgccacccagttctatttcttttttttttcgagactgagtcttgctttgtcacccaggctgcagtgcagtggtgcgatctcagctcactgcaacttccaccctctggattcaagcaattctcctgcctcagcctcccaagtagctgggataacaggcatgcaccaccatggccagctaatttttatatttttagtagagatggggtttaaccatgttggccaggctggtctcgaactcctgacctcaggtgatccgcctgcctcggcctcccaaagtgtttggattacaggcgtgagccaccacgcccgggcttaatttttttgtatttttagtagagatgtggtttcaccatgttggccagggtagtcttgaactcctgacctcgtgatctgcctgcctcggcctcctaaatgctggaattacaggcatgagccaccgcgcctggctccagttgtctttcttggaggcatggaaagttactgggggtcctattccttgtagggacattgtgtgcacagaaaagagtttcttgctttgtccacccaaactccatctttgtctttagcagagagttgtgagtattcatctcatctgagcagggcaagggggacaaaacccaaatcagcaagcagtagtgtgtttctgtttgtgcaggatgggaaattgttgtattggagaaggcgtcaatctctggaaaggacaaatggaagcaaggcttcctacccccgtgctctttccgtacttgcttcctgtgctgacgtcatttacagatctggaggcagaacattttagcttcctaagcttcagaaacatttataaggatggtagcagcagctaaggcagcagttctcaaaatgcagttctcaaaaaccctggggtttctgaagatctttcagagtccagaaggtcaaaattatcttcataataatactatttgcctctttcacactcattgtctcatgagtgaatggtagagttttcagagagtgcatgatatgtggtgatgtcactgctatgatgcctaatggcatgcatgccttaaaagtttctcagttttgattcctaataggatacatagaacccacataaacaaaggttctggggggtctttttaagagtataaagtctccataaaggatggagactcaatgatgtgaggaatggtggaagtgtgaatttaattttcttttttggggttgcagtgccagtacacagcagaagagtaccaggccatccagaaggccctgaggcagaggctgggcccagaatacataagtagccgcatggctggcggaggccagaaggtaggagaattcatgtgcctggaaagcaggcatccataccgcagactccgatggtcttgccagttccctctctgggtcctcagggattcggaagtctgctgttaactgttcctggaggtctcccagtgcccctgggaggggatgggttccagacttcattctcatccgaaggggcctgggcatggtcttgacactcgcataaccgccgtcttaagatttttacatcatctttttttttttttatttttaaagacagggtcttgctctgtcacctaggctggagtccgaccagtggtgtcatctcagctcactgcagcctccacctcccaggctcaagcgatcctcctgcctcagcttcctgactagctgggactacaggcacacgccaccacacctggttaattttttaatgttctgtagagacgacatctcgccatgttgcccaggctgatctcgaactgctgggctcaagtgatcctcccacctcggcctcccaaagtgctgggattacaggtgtgggccaccatgcccagcctttacaccattaaaaaaaaaatgttccttttgccatttgctttttttttttaattaaacactttttaaagaacttatgattgacacataataattgcatatcatttgcttctaattttaacttctgtgtatatttttggtcttccataaaatatgtcaaacagatttgtactttttgcaaactgaattttagcaactgctgggtgagttcctcctcccaacagaccattcgttctcgcgggctccatctagaagatttttgaaataaattcattgagaattttcttgaaaaaaaaattttttttaacagactggttctcactctgtcacttaggctggagtgcagtggcacgatcctagcttactgcagccttgagctcctgggctcaagtgatcctcccacctcagcctcccgagaagaatgtttaaggacagtttatcgaaaaaagtagatgaggaataaattatgtcaattttgattcacatttaagtgtggtaaggaattaacacagcttttccttaaaaacatttgtttttctaggtgtgctacattgagggtcatcgggtaattaatctggccaatgagatgtttggttacaatggctgggcacactccatcacgcagcagaatgtgggtgagtatgctctccagcagtggggacttctgcactgtccagctcctgctgaaagtctgctgtgggtgaggaggtaaggtaggtggactcagctgccagcaggaggaatggttgtggcccagcggtcagtgtcctcttcaacttgctctctttcccactcctagattttgttgacctcaacaatggcaagttctacgtgggagtctgtgcatttgtgagggtccagctgaaggtgaggggatggagtagacctgctgcccggaaggatcagtgggtggtaggagaaggtgagcaggtagggaagtaggtagctggacggggacccaggctccagagttgtgtctcagccagcgttccctagagtggtggaattcaaatactcttgctcatgtgctccctaaaagaatggaaaaactgttctcttgcacatgttcaagctgacacctaaaagttttcaccatatataaaaattgttgcaaaggatgtattttttggcatatggtaaaatctgacattttaaaatacaataattttaccatcactgataagtgtttggaaactcaactttaggcaaagcaggtccttttgttataacattgatgaaaacaaaaatatgttttgttaataagttgtttcacttcaagtcacagttatttaaggtgttaagtgagcacttaccgtaaatctgttgaatcttgttaaatattccagtggactctaaatactatagaggataagatctatcatttatttgaagaaatacaatgaacaagcttttttttaatcattagaaattttacattgttctttctttatctgaactcatatttctattctatttccccactggttttaatcctaatacatatttatggttgaaagtttggctaggcggggtggctcattcgtgtaaccccagcactttgggaggcccaggtggaaggactgcttgagcccagggatttgagaccagcctgggcaacatagcgaaagcccgtctctactaaaaatacaaaaaattagctgggcatggtggtgtatgcttgtagtcctagctactcaagaggctgaggtgggaggatcacctgagcccaggaagtcgaggctgtggtgagctgtgattgcgccactgaactcctgggtggaaaaaaagaaaagttttatcggtagccttactgtgcttctctgcctttgcctgtgtataaaaataaaaatttttggtaaattttcagtgcacttaaggctctaaatattaaaatatttcttttggatttagttatattatagctactgttaacacacaattgaccagacaattgtgtttatggtgaagagaaaacataaatacagcaaaattttgatacttagaaaaattaaagatatgaaatcttgccacaaaaataaaaaatttaaaatataaaatttatggaaaatgtatatcttaatgagatggatggtgctgttttttcttttcagttagtttatatatccatatatccataactgaatattacttacttcttttttttttttgagatggagttttgctcttgttgcccaggctggagggcaatggttcaatctcagctcaccgcaacctccacctcctgggttcaagcgattctcctgcctcagcctcccaagtagctgggattacaggcatgcgccaccccgcccgcctaattttttgtgtgtgttttcagtagagacgcggtttctccatgttggtcaggctggtctggaactcacaacctcaggtgatccacccgccttggcctccaaaagtgctgggattacaggcgtgagccaccgcacccggcctacttatttcttgaatgaacaattcagcattaattctattctgacttatttttctaaatagtactaaaaaatcttgtatctatgagtgagtagctgagaatggaaagaattgtgttatagtgtcactcatttatttgagtgctttctgagttattttttaaaaatcacagagcgctgtcatcaaacattgtatttaattctcaatcagcgaatgatgtgctcaggtccaccttctcttttggtgagaggcaggagctggacgccacctgatttacaaagggtttgctctcccgtccttacagaccattagatccagtgttcaaatcatccctttgtttcatatcccagaggtttttttttttccaagacgtagtctcactctatcacccaggctggagtgcagtggtgcaatctcggctcactgcaacctctgcctcccaggttcaagtgattctcctgcctcagtctcctgagtagctgggattacaggtgcccaccaccacacccggctaatttttgtatttttagtagagatagggtttcaccatgttgaccaggctggtcttgaactcctgacctcaagtgatccacctcccttgacctcccaaagggctgggattacagcgtgagccaccacgcccggcccggccatcccagaggttttttttaccttagggtgatgcacactgataggatttggggtgagtttctaatgtgccctttgtgtgttgggaagttgggaagggaggatcgtcttgacaccttgaccgcaggcacatgtccaggcagcccaggtctaggaagcagcactcgcgatggattctcacccagccttctgcccgtgcccctgtagcaaggccgccaggtgggagagtccggctttgaaccctgctgcttgaggaacaggggagttgtggcacgcctgccgctctcgtgtttgagttcaaactccttttctgcccccaggatggttcatatcatgaagatgttggttatggtgttagtgagggcctcaagtccaaggctttatctttggagaaggcaaggaaggaggcggtgacagacgggctgaagcgagccctcaggtgagcgcggggctgggagtctaacctgcgtcatttcagctcttgcttcagagcagatttcgattttttttggaagaggtaacacatccacatggttcaaaaatccaagcagcgtggaaggtaattctcacccctgccctggttcctgtctgccgttttcccactttcgttagtattttttcaatgtttctgtttcaggcttcccttgctgggagtaagtggtagaatcctgtactctctcttctccgtgcactcagtcatgtgtgccggaggccttcccactcctactgcgagtgcacagacagcaccctcctctccgtgctcctcagcagtcctccgctacgcacaggtagcatagttaacgtagttacacagtcacgcagatgtccgtgttagtccatttatgttgctatacaggaataccagaggctgggtaatttataaataaaggaggtttgattggcttatgattctgtggactgtactggaagcctggtgccagcatccacttctgctgaggcctcaggaagcttctaatcatggcagaaggtgaagagggaacgtggagagagagggagcaagagagagaaggaaggagtcccaggcttatttatttattttattgttgtttttcattttttgagacagggtcttgctctgttgcacaggctggggtgcagtggtgccgtcatcgctcagtgcagccttgaactcctgggctgaagtgatcttcccgcctcagcctcccgagtagctgggatcacaggcacataacaccacccccagttaattaaaaaaaaatttttttttttttggagagacagggtctccctttgttgcctaggctggtctcaaactcctgggctcaagtcatcctcctgccttgtgcctcccaaagtgccgggatcacaggcatgagccatcatgcccagcccccacactcaaaaccaccagatctctcatgagctgagtgagaactcactcaacaccaaggggatggcactaagctgtttatgaggaatccagccccaggatccagtacctcccaccaggccgcaccccccggcattggaggtcacgtttcaacatgaaatttggaggggataaacatccaaaccatatccgtgtctttgagaattgaagtgaattgaaccagaaaaacctatgagttctgtgggggagtccgtagatcccaagttaagaactctggtcatgggaggttgtgcccttgagcccccggtccccaagtgtgtgttgcctactcctgctgggaaattggagcagcctttggggggaaaaaaaagaaaaactctctgcagtttgttctccatgtcaggaggtggctggtgggttttgtgaatggcgccgtaatcttttcatactcatcttctctgtgagggcagggacttgtgtcttgtcctcactgcagtattctcagaaactaacacagtgcaggaacatgctagatgcttaccagacatcaatggggaatgcatgttagggtccacttcctctgctgctcctgagaagcaacctgtacaaaagttgtaattctattctctgatattcatgtgtaacaattcttaaccctgtttcacctttttttctcttgcccttaggagttttgggaatgcacttggaaactgtattctggacaaagactacctgagatcactaaataa

SEQ ID NO: 13668 - DNA, 681 bp, Homo sapiens
atgtctgggactgaggaagcaattcttggaggacgtgacagccatcctgctgctggcggcggctcagtgttatgctttggacagtgccagtacacagcagaagagtaccaggccatccagaaggccctgaggcagaggctgggcccagaatacataagtagccgcatggctggcggaggccagaaggtgtgctacattgagggtcatcgggtaattaatctggccaatgagatgtttggttacaatggctgggcacactccatcacgcagcagaatgtggattttgttgacctcaacaatggcaagttctacgtgggagtctgtgcatttgtgagggtccagctgaaggatggttcatatcatgaagatgttggttatggtgttagtgagggcctcaagtccaaggctttatctttggagaaggcaaggaaggaggcggtgacagacgggctgaagcgagccctcaggcttcccttgctgggagtaagtggtagaatcctgtactctctcttctccgtgcactcagtcatgtgtgccggaggccttcccactcctactgcgagtgcacagacagcaccctcctctccgtgctcctcagcagtcctccgctacgcacaggagttttgggaatgcacttggaaactgtattctggacaaagactacctgagatcactaaataa

SEQ ID NO: 13669 - DNA, 22794 bp, Homo sapiens
agatcgagctccctgtgtgcaccgcgcgctgcccgaggcgcgtaagtgggggaggagagcggcttcccccggggtggttctagccgtgggtgtggagcgtgggaaggctcagcttccgggtcgagaacctggggctgcggtggacctgatcctgaggtctcagcgtagagatgctgagtccagaggcctgttctagttcaccagtgcagtgaggggctcagtatccgggcctcccgagaggtgggtaggaaggcggggtacaggaaacttggcaccaacgcgccgggaccccaccgcggtgcggacagccaggtgtccgtggtggcgcttccttggagatgctgcctgcagacaggcgtggggaatctgaagtttgtgttaatagctaaacgaagttgagttgcagggagcgggggacgctgggaagaaatgattgatttaaaaggaatttgacgccgggcatggtggcggcatgcccccatgttccctggaggtcaagcctgcagtgagccgagatcgcacccgtaccacgacactccgtcccgggcgacagagcgagaccctgtcacgggggaaaaaataaaaataaaaatttgacgctcactttagctgagtattgagccttgttataacattgagatagaggtctggcgcggcgtctcacacctgtaatcccagaactttggaaggccgatgcgggaggatcgcttgaggccaggagttctacgccagcctggctaacatagcgaaaccccgtctctactaaaaatacaaaactaggcaggcctggtggcgggcgcctgtaatccccgctactcgggaggcggaggcatgagaatcgcttgaacccagtaggcaggtgtgccggtaagccgacatcgcaccactgcactccagcctgggggacagagcgagaatccatccaaaaaaaaaaaagttataattcacgtacaattaaattcactcccttttttaaaaaaaagtggagacatagtctcgctctgttgcccaggctggagtacagtggcgccgtctcggctcactgcaacgtccgcctcctgggttcaagcgattctttgcttcagcctctcaagtagctggaattacaggcgcataccaccacacccagctactttgtatttttcaccatgttggttaggctggtctcgaactcctcgcccttccaaagttcagggattacaggtgtgagccaccacacccagtctaaattcacccttttaaagtgtgcaattcagtggttttaatatattcacaaggttgtgcaatcaccactattatctaattccagaacatttttatcatccctaaaagaaaccttaaaaccattagcagacacccattatttcctcctactcccagcagcactaatctatgaatttacccattctcagtactgtattatacaatatttgttcttttgtgtttggtttatttcacttcatgattcaaagtccatctatgttgtatgtagcatgtatcaacttcattttttaaataactgaattatttattgtgtggatataccacattttgtttctccatttttgatggatactggtgattttctaggctttctaggtctagtcctccacagaactcgcagtctgaggcacagacatttaaaacttaagtttttggaaactagcatttaactcttgggttgggtcaggtaattcagtggcctcaggtctggtatcgtttagggcagttttttttttgttttttttttttttttgagatgaagtttcactcttgttgcccagggtggagtgcaatggcgtatctgggctcactgcaacctcacctcctgggttcaagcgcttctcctatctcagcctcctcggtaactgggcttacaggcgcatgccactatgcccggctaatttttggtatttttagtagagacagggtttcaccatgttggccatgctggtctcgaactcctgacctcaggtgatccacccatctcggcctcccaaagtgctgggattacaggtgtgagccaccgcgcctgggtgggagttttgtttttttgtttgtctgttgttttttggggggacagagtttctctcagcctcctcggtaactgggcttacaggcgcatgccactatgccaggctaatttttggtatttttagtagagacagggtttcaccgtgttggcaatgctggtctcaaactcctgacctcaggtgatccacccgcctcggcctcccaaagtgctgggattacaggtgtgagccaccacacctgggcgggagttttgtttttttgtttgtctgttgtttttttggggggacagagtttcgctcttgttgcccaggctggactgcagtggcgagatcttgactcactgccacttctgcctcctggattcaagcgattctcctgcctcagcctcccgagtagctgggattacaggtgtgcaccaccacacccggctaattttgtatttttagtagagaaggggtttctccatgttggttacgctggtctcgaactccctacctcaggtgatcctcccgccttggcctcccaaagtgttgggattacaggcgtgagccactgcgcccctctgggagtgttttttaaagtgttctattctcagttcaccacttaccaggccgttaattatcgtggtatcaagcagagaaatgtttgtgtgctggtcttctcagggaggcagaaaccgtcagagattgctgttgtgtaatgtacaccaaaacgtgttatcttgtagtataaacggtgtagttggagatgagtgtatgaaaaatgtaactgagctagctgtgggagagactagttgtgaaaaattttgagtcacccactgtatgctttcccagctatgttcaaataaggtgacactctgccttcctgtttcagctctaaaactgttcataagtgttattttggctgtatacgtagtgccatgtttttttgtatttttgtgcttttggtgattttgctgtttataggggcctccaagaatagaagtgctgtctagcatttccaagttgaaggctgtgatatatcttatagagaaaagataagcttttagattagctttgttcaggcatcacttttgttgttggctgtgagttcatgttactgcatcaacaatatatattaaataagatatctttaaacagaagcacacataaaacaaggttatgtattggcctgttgagtaaccctgtatttcccctgggagcagtggctcagtatttgctagttcagtgttcatgatggctttacaggacataactaccctgaataatgagaactgactgtctcagtagtgcttcaagggcagaaagcctagtggatatttttccatctctgcagcttttagcatttcttcactcaaggcactcatttttaatattgaactggcagttttgatgtggagagaagctaaaataaggctaaaatgctcttcatactatgtgctgagtggggactgtgctgagtgttggggattcagtgattagtgtatggccccgcagttctctaatggctgagtgtgggagtgcagagaaatgatcagtgtgagggaattaatcctatgttcccaccgtgtttttttgttttttttgagacggagtttcactcttgtcgcccaggctggagtgcggtggcgtgatctcggctcactgcaacctccgtctcccaggttcaagcgattctcctgcctcaacctcccgagtagctgggattacaggtacccgccaccgtgcccagctaatttttgtatttttagtagagacggagtttcaccatgttggccgggctggtctcgaactcctgacctcatgatctgcctgcctcggcctcccaaagtgctgggattactgggttcccacaaattttaagacttacttcaggccaggtgtggtggcttatgcctgtaatcccagcattttgggaggccgaggtgggcagatcacctgaggtcaggagttcgagaccagcctggccaacatggtgaaacccctgcctctactaaaagtacagaaaattagctgggtgtggtcgcgcatgcctgtagttccagctactcaggaggctgaggcaccagaatcacttgaacctgggaggtggaggttgcagtgagctgagattgcgccactgtactccagcctgggcaacagagtgtctccccctcaaaaaaaaaaagacatacttcagagtgtggtgagctgcataaggctttagaggtaatgacattttgagatttcaattaaaaattttttttctactttttttttttgagacagagtctcactcttgctcaggctagagtgcagtggtgcgatcttggctcactgcaaccttcgcctcctggattcaagcgattcttgtgccttagcctcctgaggagctgagattacaggcacctgccaccatgcccagctaatttttgtatctttagtagagaagaggtttcatcatgttagccgggctggtcttgaactcctgacctcaggtgatctgtctgcattggccttccaaagtgctgagattacagatgtgagccaccgtgcctggccactttttttctacttttgctaatttttttaaagtttcatgaacattatagtactgtgttcataaatgaaaataaaagaaacttgctccagtcttgttcatcaagccgttcttgaccttcacagtcagaatctcacccatcaccttgtcacatctccctcttgatctgtatatccagagtccacctgacatgcttcttcagccctccacatataataagaaatggttttgtgagccgagattgtgccattgcactgcagcttgggcaacagtgtgagactcctcaaaaaaaaaaaaaaagaaagaaaaatgcttttaggtgataaggaaatggagaagaataaaacatctttgccagtctttacctttttaatatcttgaattcatgatttcttgccatagccactatcctagtccaggctctctcccttctacccctgagttttttttttttttttttttaccatgtttttatttcctctgggaaaacacctatcagaattttgggatcatatgacagatacatatttaatttctttctttcttttttgagacagggtcttcctctgttgcccaggctggagtgtagtggtatgatcatggctcactgcagccttgaccccttcctcgcccccgctcaagtgatcctcccaccacagcttcctgagtagctgggactgccggcatgctccaccatgcccgactaacgttttgctgcttgtagagacagccatgttccctaggcttgtcttgaactcctgagcctcaagcgatccttccacttcagcctcaagtgctgggattacaggcgtgagccaccactcctggctacttaatttctttctttctttttttttgagacagtctcgttctgtcacccaggctggagtgcagtggggtgatctcttctcactgcagcctctaccttccaggctgaagcaagccttccacctcagccccctgagtagctaggactacgggaacattccaccaggcccagctaatttttgtattttttgtagagatggagtttcatgatgttggccaggctggtcttgaactcctcacctcatgcaatccgcctgcctcagcctcccaaagtgctgggattacaggtgtgagcaactgcacccagcgggccccgcccagacctattttcaaaattagaaaaccgtgaggcttctggaagaagatgagaagaatatcttcatgacctgagtgtgtgcaaaggtttcttagggctcaggatgccagagtcacttaaaaaagcaaaaaaaacccaaaaaaaaaaccacacacacaaagataaatatgattgattacatcaaaatgtaatcacagactactctaagaaaatgaatggggaaacacagggacctatttgacaaaagactgatattcaagataaataaagaactaataggccaggcgcggtggctcacgtctgtaatcctggcactttgggaggccgaggcggggggatcacttgagctcaggagttcgagaccagcctgagcaatatagtgaaaccccatctctactaaaaatacaagaattagaattagctgggcgtgatggcacgtgcctgtagtcccagttactcgggaggctgaggctggagaattgcttcagtcaggaagatggaggttgcagtgagccgagattgtgccactgcactccagcctgggcgactgaacaagacttcgtctcaaaaaaccagtagggctccaggcctgggattgggcctctgctgctctactccctggacgtgtggctccgtccttggagtcggcctttggttttcatgaagagtagtgtgcattaacagctgagtggttttatcagcctgtttcctgccaacagtgtatgagagttccagttgctttacatccttgccagcatttggtgttgtcagtcttttgagttattctgatgggtgtggtgtgtcatggtcttaattttagtcctcagtcactaatggtgtttagcactttttcctgtgcccatgacaatgtgcatcttcctttgtgaagtgcctgctcaaatcttttgcccattttacattgggttgtgtgtctttttattattgagttgtagcagttatttatataacctttatatcctggttacctgtcctctgtctggttgcctattcattttcttagagttgtctgatgaacagaagttttacattttgatgtaatcagttttctcttatattttcttttatagttactgctttctgagtcctaggaaatcttggctaccttcaggctgtgaagataatctttcatgttttcttctgtaagttttttttttttttgagacagagtcttgctctgtcgtccaggctggagtgcggtgatggcgatctccgctcactgcaacctctgcctcccaggttcaagcgattctcctgccccagcctcccgagtagctgggattacagacatgcgccaccatgcccaactaatttttgtatttttattagagacagggtttcaccaggttggccaggttggtcttgaactcttgaccttgtgatccacccgcctcggtctcccaacatgctgggattataggcgtgagccaccgtgcccggcctataaattttatagttttagttttatgtttaagcctatcacccatttctagtttaggtgaatggtgtgagatataattaaatattaatttcttttccatatagatatccagtcattccagcaccatttgttgaaaatgctattgtattgcgttttggaaattaagatgactgtacaaatggtaattgatgtctgcactcccttttctgttccattgttcaatccttgtgttagtaccacacttttaattactgtagctttttagtaagtcttgaagtcatgtagttgtaggtcttccaattttgttgttttcaagcttgatgtgaatattctaaatcctctgcatttccatataaatatcagaattatctttaccagttttacagaaaagtctggtaaagttgtgattgggattgcattgaatctatggatcaatttggaaagaaatgacacctaaacagtattgagtcttcaaatatatgaacttggtgcattttccttcttatttaagccttttaaaatttctttttaggccgggtgcagtggcttatgcctgtaatcccagcactttgggagtctgcagcgggcagatcagctgaggtcaggagttcgagaccagcctggccaacatggtgaaaccccgtctctactaaaaatacaaaaattagccaggtgtggtggcaggtgcctgtagtctcagctacttgggaggctgaggcaggagaactgcttgaacttgctcaggaggtggaggttgcagtgagctgagatagtgccattgcactccagcctgggcaacaagagcaaaactctgtctcaaaaaataataataataaaaataaaaattttgggccaggtgtggcggctcacacctgtaatcccagcaatttgggaggctgagccgggtggatcacctgaggtcaggagtttgagaccagcctgaccaacatggagaaaccctgtctctacgaaaaatacaaaatttgccaggcatggtggcgcatgcctgtaatcccagctactctggaggctgaggcaggagaatcacttgaacctgggaggcagaggttgcagtgagccgagatggtgccattgcactccagcctgggcaacaagagtgaaactctgtctcaaaaaaaaaaaattcttttagttctgttttatggttttcagttcagaagtcttatacatattttgttaaattgatttctagatatgtttcttacctttattgtaaaatggagccatcatttgcatcattcattactctgtatgtaatgtgttatcattctctacctgctttcaagattttctctttatttttgttttttagcagtttgtctgtggtgtatctaggtgtcattttatttgtatttatccggagatttattcttgagatttgcagagcttcttaaatctgtaaatttatgtctgtcggccaatttgggaaatttggagctattagttttaaaaatatttcttctgttccattctctttcacttcttctgtatgtgagttcaatttcacttcaattgtatgtgagttagacattttgatattagcccacaggatcctgaggttctttcattcttttcaatcttttttttttctcgaagtttgcatttcgtgagcaggagtgacagtcattcaggatgatttttgagattcctagttcaagagtagttcctattcttttctaggtgtagtcaagtatggcttctaattctactagaaggcttttttgtcggggaggtggttctatgtcctttggctcttacattttctttgtgtctttcacagcacagttttcagagggtaccctttctctttggttttgttttgttttgttttgttttagacggagtcttgctctgtctccaggctggagtgcagtggcgcaatcttggctcactgcaacctctgctcactgctacctctgcctcccgggttcaagcaattctcctgcctcagcttcctgagtagctgggactacaggcacgcgccaccacacccaactaatttttgtatttttagtagagactgggtttcatcatgttggcaaggctgttctccatctcttgacctcgtgatccgcccgccttggcctcccaaagtgctaggattacaggcgtgagccaccgcgcccggccaacagagggtaccctttcattctttttctccttcttcccagaaggcttgcgttttcaagactacctcatcaagttctgcatgtgtttaaaagtgtctctacccgaccttcccttcctccctcccgatttaacggaattctttgttggtgttttcatacttaccgtgagttttctttttcagggtgatattttagttccatcttaggctctccattgtcctcttctctcttctttttttttttgagacagagtctcattctgtcacccaggctggagtgcagtggtgtgatctctgctcactgcaacctctgcctcccaggttcaagtgattctcctgcctcagcctcccgaatagctgggattacaggcgcacacaaccacgcccacctaatttttgtattttcagtagagacggggtttcaccatcttggccaggctggtctcaaactcctgacctcgtgatccgcctgcctcagcttcccagagtgctgggattacaggcatgagccaccgcgcccggtgcgcccagccctcttctctcttctttgcatctctcttcctatctggatccctctttgctgtccttaaagagctgagatgagagattgagaaacatctctacaagaaattgacgtttttctacttatgggtaattagaagcttgtagtattttcagtcttctaagtatgttgaagatatgagacgttggtgattttctttgtttctccggttggttggtctgtgtagtttttggacatgtgtttggatatttggatttatatagctgccataatcttggctatgcaggtagtctttcctgacacttcatcctgaaagatttgaagcctttggacaaattttacagtgggctgggtgcagtggctcacgtctgtaatcccagtgctttgggaggctgggcaggaagattgcttgagcccaggagtttgagaccagcctggacaacatagtgagacccgtgtctctacaaaaaataaaaaatatgccgtgtgtggcgttatacaactgtagtcccagctacttaggaggctgaggtgggaagatcacgagccaaggagtttgagggtacggtgagccatgatcgcctcactgcactgggtggcacagcgagactgtctcaaaaaaaaaatttacaattaatgtctgcatatccttcacctaggttcataaatttgtacttttgctttatctacttgcctttttctctctctctacacacacacacacacacacacacacacacacaattagttgaatgaattgagagtaagttgcagaaaacatgacactttactccaatattgcatcatacaaaatcatacatctagtgataggccattgtcctacagaatcacgatataattatcacactaaccagctgtggtggtgcacacctgtagtctaagctactcgggaggctgaggcagaaggatcacctgagcccaggaggttgtggctgcagtctcatattcatcccatcatcagatttctcccattgtcctaataatattctttatagcttttctttatccctgatccgaaatttcattgaagatcacacagtgcatttagttgtcatgcctcttaagtctttatttatttattatttattttttgagatggagtcttgctctgttacccaaactggagtgcagtggcatgatcttggctcatgcaacctccacccgctgggttcaagtgattatcctgcttcagcctcccgtgttgctgggactacaggtgtgtgccaccatgcccagctactttttatatttttagtagagacgggaattgtaccatgttggccaggctggtcttgaactcctgagctcagatgatccacccgccttggcctcccaaagtgctgggattacaggcgtgggccaccacacccagccttaagcctcttttaacataaaagagttcaccagccattctattttgttttgctttttgagacactgatgctttggagagtccaggccagttgctttgtagatttcaacttgtttgattgtttcctgatgattaggttggtagaaatactacctcaatgatgggaccttcttagtgcgtccatcaggaagcacatgatgtgactgtaattggtgacattaagtttgattccttaataattaaggtggtaactcccaggtttctacattgtaaaggcatcttttgccgccctcctttttattcccaagtagtttatttggagattagtcctttacacagtagaggagcggggaagggagacaggaaaggaaagtttgacaacaaagggtgagttttcaagcctgttgccacgggggaacctaattccactggagaagctcatggcttggtgatgttccacagaggggtcagaaatttagcgtatttcaacaccagctcctgtcaggcaccatttgagggctgctgccagggtggttcaattttctggtgcttacagcttgccataaacaggtgcaaagtagtctggataccaaagaaagctctcaggtaacaagatgcagatgttggcatttggaagtcagaatagggtgcactattgtggtaagagctgaagggatggctgggcgcggtggctcacacctgtagtcccagcactttgggaggatgaggcaggcggatcacctgaggtcagaagttcgagagcagcctggccaacatgacgaaaccccgtctctactaaaaatacaaaaattagccaggcgtggtggtggatgcctgtaatcccagctattcagtaggctgaggcaggagaattgcttgaatctgggaggtgtaggttgcagtgagctgagatcacaccactctgcactccagcctgggtgacagagcgagactctgtctcagaaaaaaaaaaaagctgaagggatgctgagtagagcatccgtagtgtctgctatacctgggtaccctagaacctggagaacctacagcttgaggcaagagcgtatgtgctattattttttcaagaagtgtgctctcaggaagcagaggtaggggaaaggtgagtgaagggagaaggaagattaagtcagttcaagggtgcattttgaagttggttgcccttggtgcaagtacagttggttgcttgttctcctaaagctgtctcccaggaggatgtatacataactgcattccagggcaatccatctaaaggaagggtggacggacccctcagcttctgtatctcactggaaaaaggtttgcttcatggcacattaattcccatagacttctaggttgtgcatgtgtgggtaccaggtgggtcccacagacccttacacctccaaggcaagcagcaagccacgggtgggaagtgataggtacccagtatgagcaggaggtaagggaccgtggggttgtgcctgtgggcagttggttataacccagacgtgtttgatcagcccagtgacagctggagtggacaaagtgaccaagggcctcaaggacacacaaggccaagaagatttgaagtgctgtgtaagatatgcctaatgcatttggattctacctttgtttaacgaatatgcacacataaaaaacacttgaactccttgagcccaggagttcaagaccaacctgggcaacatagtgagacactcatctctaaaaaaattttaaaaaaaattaacctggcatgatagcactcacctgtagtcctgtctactctggaggccgcagtgggaggatcacctgagccctggaggtcaaggttacagtatgctatgattgcaccactgcattccagcctgggtaacagagcaagacgctgtctcttaaattttttttttttttttttttacttttataatggaaaaaccattgtagacagttttaggaaggaaagcagaatagtaagacatctttttcaaagtaaaagagcaaaaaaggcaaaaaatatttcacatttactttatggacaaagataagattgtccttcaataaaagactgaattttttttgtttgttttgttttgttttttgagaaagagtcttgctccattgcccaggctggaatgcagtggtgtggtctcggctcactgcaacctccgcctcccgggtacaagcaattctccagcctcagccccccgagtagctgggactacaggcacgcgccactgcatctggctaagttttgtatttttagtagagatggggtttcaccatgttgaccaggctcgtcttgaactcctgacctcaggttatccacctgcctgggcctcccaaagtgctgggattacaagtgtgagccaccgtgcccggccacaagttgctctttaaatgtgagaagtgttctggcatggtggctcacacctgaggcgggtggatcacttgaggtcaggagttcgagatcaggctggccaacatggtgaaaccccgtctctagttatttatttatttatttatttatttatttatttatttatttttttgagacggagtttcactcttgtttcccaggcgggagtgcaatggcgcaatctcggctcactgcaacctccgccttccgggttcaagcgattctcttgcctcagcctcctgagtagctgggattacaggcatgcaccaccacacccggctaattttgtatttttagtagagacggggtttttccatgttggtcaggctggtctcgaattcctgacctcaggtgatctgccctcctcagcctcccgaagtgttgggattacaggcgtgagccaccacgcccggccctgtctctactaaaaatgcaaaatttagccgggcatggtggcgcacacctgtaatctcagctactcaggagactgaagcagcagattcgcttgaacccaggaggtgaaggttgcagtgagctgagaccacaccactgcagggcagcctaggcgacaagagcgaaacgcttacaaaaaaaaaaaaaaaaaaagattcacaggtgatggtgatgctgctggttaaggaagtgaagtggctttttgctctgtagccttcctgaatgttggggcctcctgctcttcatttgtttcatttctattaagtctcctccctccagctatcttgttagctcctggaaagcatttcagtgattgtggcttctatttctttttgaccccacagtgtccagggtcatgctgcctatatagtagtgagcagtaagttgaggtttttaaaaactttattattattatttttgagatggagtcttgttctgtcacccaggctggagtgcagtggcacaatctcagttcactgcaacctctgcctcccaagttcaagtgattctcctgcctcagcctcccgagtagctgggactacaggcgcctgccaccacatccggctaatttttttgtatttttagtacagatggggtttcactatgttggtcaggctgatctcgaactcctgacctcaggtgatccgcctgctttggcctcccaaagtgttagggttacaggtgtgagccaccacacctggccggtttttttaaactttaaaacagattcacttgatttttcttccctaccccccagcttttttgaggtatgactgacaaaaattgtatatatttagggtgtacaatgtgatgatttgatatgtgaatgcactgtgaaatgattaccacagtcaaggtaattcacatatccaccacctcccagttaccctcttagctagtacaggttgggtattgcttctctgaaatgctttgggaccagaagtgttttggacttcagattttggaatatttgaatatatataatcagatatcttgggaaggggacccaagtctaaacatgaaattcatttgttttcagagcctaaagatgatttttttttttttttttttttgagatggagtctcactctcgcccaggctggagtgccgtggcacaatctcagctcactgcaacctctgcctcccaggttcaagcgattctcctacctcagcctcccaagtagctggaattacaggctcgcactaccacacccggctaatttttgtatttttataaagacatttcaccatgttggccaggctggtctcaaactcctgacctcaggtgatccgcccgcctcagcctcccaaagtgctgggattataggtgtcagtgactgcgtctggctgataattgaatttttctcttggagaagctgaataaactgtgtgttgtgtgcctgcctttttttttgtttttttttttttttgagacagagtcagacactctgtcacccaggctggagtgcgatggggtggtcatagctcactgcagcctcaaactcctgagctcaagcgatcctcccacatcagcctcctaagtagcatagcaccacgcctggctaatttttaaattttttgtagtgatggggttttgttgtctaggctagtctcaaactcctgggctcaagcagtccttctgccttggcctcccaaggtggtaggattataggtttgagccaccatgcctggccattacctgtgttttgactataacacatcatgttggcactcaaaacgttttggattttggagcattttgaattttggatttttggattagcaatgttccacctatagtacattttttgtttgctttcccataaagaattttttgtaattttgattttatagttctaaatgtaatatattcttattgtaaaaatcacctttaatagcaccgccagaatagcaaacatgttaacagaaaggtagaagtagaccttaaagaatcttcagcagcttgagagaccacagctaaccactgaggaactctgttctggattggagcagtgcttagaagcttataaataactcttagggtattgcatagggattctttttttttttttttcctgaaatggagtctcgctctgtcgcccaggctggagtgcagggtgtgatctcagatcactgcaacctccgcctcctgggttcaagcaattctttgcctcagcctcccgagtagctgggattacaggcgcctgccaccatgcccagctaatttttttggatttttagtagagagggggtttcaccatgttagccaggatggtctccatctcctgaccttgtgatccacccacctcggcctcccaaagtgctgggattacaggcatgagccactgtgcctggccgcataaggattctttatgtgatttttcagtagaggctcttgccttttactttaaacattctttgagggttgttttttttttccgctttttatttatatagaggtcaaccagaatcaagatgtctgggactgaggaagcaattcttggaggacgtgacagccatcctgctgctggcggcggctcagtgttatgctttggacaggtaactgtggttccttcatgccgggaaagaatgaggtgaagtgagtaaagttagggcaaggcagtttgtagagcatcgtagtacatgtgtgagcagtacctagtacgtttacctagtacgtgtgtgagcagtacctagtacgtttacctagtacgtgtgtgagcagtacctagtacgttgacgcggtgcgtgcgggggcagtacctagtacgtttacatagtacatgtgtgagctatttgttattggtttttcctttagatgcattttttgggagtcttgtgaactctggagggcattttggaatgttagctatcaaaagactgatagtactggggattagatttagattttaaattttttgtggggggggatagataacatatttgtatgacatcaaattcaaaatgaaactgtgaaaatctccctatttcctattgcccctgtgtgcatgccacccagttctatttcttttttttttcgagactgagtcttgctttgtcacccaggctgcagtgcagtggtgcgatctcagctcactgcaacttccaccctctggattcaagcaattctcctgcctcagcctcccaagtagctgggataacaggcatgcaccaccatggccagctaatttttatatttttagtagagatggggtttaaccatgttggccaggctggtctcgaactcctgacctcaggtgatccgcctgcctcggcctcccaaagtgtttggattacaggcgtgagccaccacgcccgggcttaatttttttgtatttttagtagagatgtggtttcaccatgttggccagggtagtcttgaactcctgacctcgtgatctgcctgcctcggcctcctaaatgctggaattacaggcatgagccaccgcgcctggctccagttgtctttcttggaggcatggaaagttactgggggtcctattccttgtagggacattgtgtgcacagaaaagagtttcttgctttgtccacccaaactccatctttgtctttagcagagagttgtgagtattcatctcatctgagcagggcaagggggacaaaacccaaatcagcaagcagtagtgtgtttctgtttgtgcaggatgggaaattgttgtattggagaaggcgtcaatctctggaaaggacaaatggaagcaaggcttcctacccccgtgctctttccgtacttgcttcctgtgctgacgtcatttacagatctggaggcagaacattttagcttcctaagcttcagaaacatttataaggatggtagcagcagctaaggcagcagttctcaaaatgcagttctcaaaaaccctggggtttctgaagatctttcagagtccagaaggtcaaaattatcttcataataatactatttgcctctttcacactcattgtctcatgagtgaatggtagagttttcagagagtgcatgatatgtggtgatgtcactgctatgatgcctaatggcatgcatgccttaaaagtttctcagttttgattcctaataggatacatagaacccacataaacaaaggttctggggggtctttttaagagtataaagtctccataaaggatggagactcaatgatgtgaggaatggtggaagtgtgaatttaattttcttttttggggttgcagtgccagtacacagcagaagagtaccaggccatccagaaggccctgaggcagaggctgggcccagaatacataagtagccgcatggctggcggaggccagaaggtaggagaattcatgtgcctggaaagcaggcatccataccgcagactccgatggtcttgccagttccctctctgggtcctcagggattcggaagtctgctgttaactgttcctggaggtctcccagtgcccctgggaggggatgggttccagacttcattctcatccgaaggggcctgggcatggtcttgacactcgcataaccgccgtcttaagatttttacatcatctttttttttttttatttttaaagacagggtcttgctctgtcacctaggctggagtccgaccagtggtgtcatctcagctcactgcagcctccacctcccaggctcaagcgatcctcctgcctcagcttcctgactagctgggactacaggcacacgccaccacacctggttaattttttaatgttctgtagagacgacatctcgccatgttgcccaggctgatctcgaactgctgggctcaagtgatcctcccacctcggcctcccaaagtgctgggattacaggtgtgggccaccatgcccagcctttacaccattaaaaaaaaaatgttccttttgccatttgctttttttttttaattaaacactttttaaagaacttatgattgacacataataattgcatatcatttgcttctaattttaacttctgtgtatatttttggtcttccataaaatatgtcaaacagatttgtactttttgcaaactgaattttagcaactgctgggtgagttcctcctcccaacagaccattcgttctcgcgggctccatctagaagatttttgaaataaattcattgagaattttcttgaaaaaaaaattttttttaacagactggttctcactctgtcacttaggctggagtgcagtggcacgatcctagcttactgcagccttgagctcctgggctcaagtgatcctcccacctcagcctcccgagaagaatgtttaaggacagtttatcgaaaaaagtagatgaggaataaattatgtcaattttgattcacatttaagtgtggtaaggaattaacacagcttttccttaaaaacatttgtttttctaggtgtgctacattgagggtcatcgggtaattaatctggccaatgagatgtttggttacaatggctgggcacactccatcacgcagcagaatgtgggtgagtatgctctccagcagtggggacttctgcactgtccagctcctgctgaaagtctgctgtgggtgaggaggtaaggtaggtggactcagctgccagcaggaggaatggttgtggcccagcggtcagtgtcctcttcaacttgctctctttcccactcctagattttgttgacctcaacaatggcaagttctacgtgggagtctgtgcatttgtgagggtccagctgaaggtgaggggatggagtagacctgctgcccggaaggatcagtgggtggtaggagaaggtgagcaggtagggaagtaggtagctggacggggacccaggctccagagttgtgtctcagccagcgttccctagagtggtggaattcaaatactcttgctcatgtgctccctaaaagaatggaaaaactgttctcttgcacatgttcaagctgacacctaaaagttttcaccatatataaaaattgttgcaaaggatgtattttttggcatatggtaaaatctgacattttaaaatacaataattttaccatcactgataagtgtttggaaactcaactttaggcaaagcaggtccttttgttataacattgatgaaaacaaaaatatgttttgttaataagttgtttcacttcaagtcacagttatttaaggtgttaagtgagcacttaccgtaaatctgttgaatcttgttaaatattccagtggactctaaatactatagaggataagatctatcatttatttgaagaaatacaatgaacaagcttttttttaatcattagaaattttacattgttctttctttatctgaactcatatttctattctatttccccactggttttaatcctaatacatatttatggttgaaagtttggctaggcggggtggctcattcgtgtaaccccagcactttgggaggcccaggtggaaggactgcttgagcccagggatttgagaccagcctgggcaacatagcgaaagcccgtctctactaaaaatacaaaaaattagctgggcatggtggtgtatgcttgtagtcctagctactcaagaggctgaggtgggaggatcacctgagcccaggaagtcgaggctgtggtgagctgtgattgcgccactgaactcctgggtggaaaaaaagaaaagttttatcggtagccttactgtgcttctctgcctttgcctgtgtataaaaataaaaatttttggtaaattttcagtgcacttaaggctctaaatattaaaatatttcttttggatttagttatattatagctactgttaacacacaattgaccagacaattgtgtttatggtgaagagaaaacataaatacagcaaaattttgatacttagaaaaattaaagatatgaaatcttgccacaaaaataaaaaatttaaaatataaaatttatggaaaatgtatatcttaatgagatggatggtgctgttttttcttttcagttagtttatatatccatatatccataactgaatattacttacttcttttttttttttgagatggagttttgctcttgttgcccaggctggagggcaatggttcaatctcagctcaccgcaacctccacctcctgggttcaagcgattctcctgcctcagcctcccaagtagctgggattacaggcatgcgccaccccgcccgcctaattttttgtgtgtgttttcagtagagacgcggtttctccatgttggtcaggctggtctggaactcacaacctcaggtgatccacccgccttggcctccaaaagtgctgggattacaggcgtgagccaccgcacccggcctacttatttcttgaatgaacaattcagcattaattctattctgacttatttttctaaatagtactaaaaaatcttgtatctatgagtgagtagctgagaatggaaagaattgtgttatagtgtcactcatttatttgagtgctttctgagttattttttaaaaatcacagagcgctgtcatcaaacattgtatttaattctcaatcagcgaatgatgtgctcaggtccaccttctcttttggtgagaggcaggagctggacgccacctgatttacaaagggtttgctctcccgtccttacagaccattagatccagtgttcaaatcatccctttgtttcatatcccagaggtttttttttttccaagacgtagtctcactctatcacccaggctggagtgcagtggtgcaatctcggctcactgcaacctctgcctcccaggttcaagtgattctcctgcctcagtctcctgagtagctgggattacaggtgcccaccaccacacccggctaatttttgtatttttagtagagatagggtttcaccatgttgaccaggctggtcttgaactcctgacctcaagtgatccacctcccttgacctcccaaagggctgggattacagcgtgagccaccacgcccggcccggccatcccagaggttttttttaccttagggtgatgcacactgataggatttggggtgagtttctaatgtgccctttgtgtgttgggaagttgggaagggaggatcgtcttgacaccttgaccgcaggcacatgtccaggcagcccaggtctaggaagcagcactcgcgatggattctcacccagccttctgcccgtgcccctgtagcaaggccgccaggtgggagagtccggctttgaaccctgctgcttgaggaacaggggagttgtggcacgcctgccgctctcgtgtttgagttcaaactccttttctgcccccaggatggttcatatcatgaagatgttggttatggtgttagtgagggcctcaagtccaaggctttatctttggagaaggcaaggaaggaggcggtgacagacgggctgaagcgagccctcaggtgagcgcggggctgggagtctaacctgcgtcatttcagctcttgcttcagagcagatttcgattttttttggaagaggtaacacatccacatggttcaaaaatccaagcagcgtggaaggtaattctcacccctgccctggttcctgtctgccgttttcccactttcgttagtattttttcaatgtttctgtttcaggcttcccttgctgggagtaagtggtagaatcctgtactctctcttctccgtgcactcagtcatgtgtgccggaggccttcccactcctactgcgagtg

SEQ ID NO: 13670 - DNA, 577 bp, Homo sapiens
agatcgagctccctgtgtgcaccgcgcgctgcccgaggcgctgccagtacacagcagaagagtaccaggccatccagaaggccctgaggcagaggctgggcccagaatacataagtagccgcatggctggcggaggccagaaggtgtgctacattgagggtcatcgggtaattaatctggccaatgagatgtttggttacaatggctgggcacactccatcacgcagcagaatgtggattttgttgacctcaacaatggcaagttctacgtgggagtctgtgcatttgtgagggtccagctgaaggtgaggggatggagtagacctgctgcccggaaggatcagtgggtggtaggagaaggatggttcatatcatgaagatgttggttatggtgttagtgagggcctcaagtccaaggctttatctttggagaaggcaaggaaggaggcggtgacagacgggctgaagcgagccctcaggcttcccttgctgggagtaagtggtagaatcctgtactctctcttctccgtgcactcagtcatgtgtgccggaggccttcccactcctactgcgagtg

SEQ ID NO: 13671 - DNA, 4609 bp, Homo sapiens
gggggcctcggagcaagatggcggcggcggggtccgtgaggcgcgggcggcggcgaccgcggcgccagtgagggggccctggggcccgggcggctccgggccggggccccgccgcgggacggaccatgctacgctccactggcttcttccgggccattgactgcccctattggtctggggcgcccggggggccctgccggcggccctactgccacttccggcaccgcggggcccggggctccggcgcgcccggtgacggcggagaggcgccccccgcagcagggctgggttacgacccctacaaccctgagctgcccaagccccccgcgcagagggagaatggcaccctgggcctgggggaggagccgcgcccggatgtgctggagttggagctggtcaaccaggccatcgaggccgtgcgcagtgaggtggagctggagcagcggcgctaccgggagctgctggagacgacccgtgagcaccgctccgccgaggcccccgccctggcgccccgcggccccaacgccagccccactgtgggcccggacgaggatgccttcccactggccttcgactacagccccggcagccacggcctattaagccctgatgccggctaccagcccaccccactggccgcccctgccgagccgggcagcaagtactcgctggcgtccctggacaggggtcagggcagaggtggagggggtggcggtgccctggaatacgtccccaaggctgtgagccagccccggcggcacagccgccccgttcccagtggcaagtacgtggtggacaactccaggccacccacagacctggagtatgaccctctctccaactactcggcccggcacctcagcagggccagctcccgggatgagcgggccgccaagcggccccggggctcccgcggcagtgagccctacacacctgctcccaagaagctctgtgacccctttggcagttgcgatgcaaggttctcagactcagaagatgaggccgccacggtcccaggtaacgagcccaccacggccagcacccccaaagccagggccgaccctgagatcaaggccaccgggcagccaccctccaaagagggcctggaggccgaggggggcggcctgcgggagaccaaggagacggccgtgcagtgcgacgtgggggacctccagccgcccccagccaagcccgcctccccagcccaggtccagtcctcacaggatgggggctgccccaaggagggaaaacccaagaagaaaaaaaccggggccccacctgcccccagctgcaaagacggggcccaggggaaggacaagaccaaggacaagggccgagggcggcctgtggagaagccccgtgcggacaagaagggcccgcaggccagcagcccccggcgcaaggcagagcggccggaagggaccaagaagaagccatcttcggccactcctgtggccacctcagggaaagggaggcctgaccggccagcgcggcggccgagccccacaagcggggactcccgaccggcggccggcagaggcccaccccgccccctccagctgcccgacaggaagagcaccaaggccccgtcggggaagctagtggagcggaaagcccgctcactagacgagggcgcctcccaggacgcccccaagctgaagaagcgggccctgagccacgccgacctctttggggacgagagtgaggacgaggccgcagggccaggggtgccgagcgtgtggccctctgccctccccagcctcagctcggactcagactccgactcagactccagcctgggcttcccggaggcgcaggggccgcccaagcggctcaaggcctccccgcccccctcccccgccccatcctcctcctcctcctcctcctcctccacctccagcgcgggggcggatgtggactactcggccctggagaaggaggtggactttgactccgaccccatggaggagtgcctgcggatcttcaacgagtccaccagcgtcaagacggaggacagaggccggctggcccggcagccccccaaggaagagaagagtgaggagaaggggctttcgggtctgaccactctgttccccgggcagaagaggaggatctcccacctttccaagcaaggccaggaggtggagcccccgaggaggggtcccgcggtgcccccggcccggcccccgacggcgcaggaggtgtgctacctgcgggcccagcaggcgcagagggcatcggcgagcttgctgcaggcccccgccaggctggcagagaagtcgccctccgtccacatttccgcccctggcgagaagaggaggatcgcccacatccccaacccccgcctggctgcagcccccacaggtgccaagaggacccttgcggccagcggcagccagtcctccaacggccctgagccaggtggccagcagctgaaaacacgcacattgtcggggatggcgtccaagactaccaccaccatcatccctaagcgaatcgcccacagtccatccttacagagtttaaagaaacccattatccccaaagagtttgggggcaaagtccccaccgtcatccgccagcgctatctcaacctgttcatcgaggagtgtctcaagttctgtacctccaaccaggaggccatagagaaggcactgaacgaggagaaggtggcctatgaccgcagccccagcaagaacatctacctgaatgtggccgtgaacaccctcaagaagctcaggggcctggcccccagcgctgtgcccggcctcagcaaaaccagtggccgcagggttgtgtcccacgaggtggtgttggggggcaggttggccgccaagaccagcttctcgctcagccgtccaagcagcccccgggtggaggacctgaaaggggctgccctgtacagccgcctcagggagtacctgctcacccaggaccagctcaaggagaacggctaccccttcccgcacccagagcggcccgggggcgcaatcatcttcacagctgaggagaagaggcccaaggactcttcctgcaggacctgctgccgctgtggcaccgagtacctcgtgtcctcttcaggccgctgcatccgggacgaggagtgttattaccactggggacggctgcgccggaaccgggtggccggaggctgggagacccagtacatgtgctgctcggctgccgccggctctgtcggctgccaagtcgcaaagcaacacgtgcaggatggccggaaggagcgccttgagggcttcgtgaagacctttgagaaagagctctcaggagacacccacccggggatctacgccctggactgcgagatgtcctacaccacatatggcctggagctgacgcgcgtcacggtggtcgacacggacgtgcacgtggtttatgacaccttcgtgaagcctgacaacgagatcgtggactacaacaccaggttttcgggggtgacggaggctgaccttgccgacacaagtgtcacgctgcgtgacgtccaggccgttctgctgagcatgttcagcgctgacaccatcctcatcggacacagcctggagagcgacctcctggccctgaaggtcatccacagcaccgtggtggacacgtctgtgctcttcccccaccgcctgggcctcccctacaagcggtccctgcggaacctcatggccgactacctcagacagatcatccaggacaatgtggatgggcacagctccagcgaggacgccggcgcctgcatgcacctggtgatctggaaggttcgagaagacgccaagaccaagcgatgacgcctgcccgcctcccacccgcctctcctgccgtcccgctggtccttagccccatgcctcttccaaaacagtgcaataaatctccggtaacccgtccacctggccgaggcagcccagagcagcgggatgagctggcggccagagaacgcccagcccagcccacccccgctcacgtcctgccgcacccctccgccggtccccaccctctgccccccagccctctggcgtctctagaaactgctgctgatggagaccaggacagagcccgcccccacccggcccgcagcccctcctgcccctcctgccaggccctccctcccgggtggtggccggcacctctgctcctcacgtgggtcgcggggcgggcttgtcccaggtttgtttgagacagtctttttttattttgtattgttatttttattatttttaatttaaacctgatgacttgcacagcatctttcccaccgggaagagcgggcctgctgccttccctcctgcggggtgggggtgggacagaccccagtgggggccagggccacactcagcgcagtgtgggctggacccgcctctgtgctccaggggctggccggtcttcgggggcgccggcttccaccactcgccgccccacccctgcactccgtgacctctgagaacccagctggcccctcgttagccccagggtctgccgtctagagggagcccaccggcctccggacactgtcttcccgctagagccccgtcctcctctgcggggctctccggacccccttccccctcacctccaggcagggacagaataaatgtttgtatggatttta

SEQ ID NO: 13672 - DNA, 672 bp, Homo sapiens
acggacgtgcacgtggtttatgacaccttcgtgaagcctgacaacgagatcgtggactacaacaccaggtgtggccagtgccctccacgagctgggagccctcccagccgcctctccccagggacccaccctcccccgccccaccagccagtgcttccaggctgagccctggtgcccctcctgcccgttcccccaggttttcgggggtgacggaggctgaccttgccgacacaagtgtcacgctgcgtgacgtccaggccgttctgctgagcatgttcagcgctgacaccatcctcatcggacacagcctggagagcgacctcctggccctgaaggtgccctgccggcccgggtcccgcgcggttctccagcaggacctgcgcaggccccacgtgcgctgatctctgccgctgcccacaggtcatccacagcaccgtggtggacacgtctgtgctcttcccccaccgcctgggcctcccctacaagcggtccctgcggaacctcatggccgactacctcagacagatcatccaggacaatggtgagtgccggtgcctgccctggggccgtccctgcgcaggggccgggtgctcaccgcatctgccccgcagtggatgggcacagctccagcgaggacgccggcgcctgcatgcacctggtgatctggaaggt

SEQ ID NO: 13673 - DNA, 544 bp, Homo sapiens
acggacgtgcacgtggtttatgacaccttcgtgaagcctgacaacgagatcgtggactacaacaccaggttttcgggggtgacggaggctgaccttgccgacacaagtgtcacgctgcgtgacgtccaggccgttctgctgagcatgttcagcgctgacaccatcctcatcggacacagcctggagagcgacctcctggccctgaaggtgccctgccggcccgggtcccgcgcggttctccagcaggacctgcgcaggccccacgtgcgctgatctctgccgctgcccacaggtcatccacagcaccgtggtggacacgtctgtgctcttcccccaccgcctgggcctcccctacaagcggtccctgcggaacctcatggccgactacctcagacagatcatccaggacaatggtgagtgccggtgcctgccctggggccgtccctgcgcaggggccgggtgctcaccgcatctgccccgcagtggatgggcacagctccagcgaggacgccggcgcctgcatgcacctggtgatctggaaggt

SEQ ID NO: 13674 - DNA, 3010 bp, Homo sapiens
taccaccaccatcatccctaagcgaatcgcccacagtccatccttacaggtagcccctcccatctcggccaggaccaccacccccaagaccacgccctgaggcccggccacatgggacctgcggagggccagcctcgcccctgccctgcgggccttcgtgctccacaccgcagtacagccttcaccttccctccccatgccttggtgttttttttttttttttgagatggagtctcgctctgtcgcccaggctggagtgcagtggcacgatcttggctcactgcaagctctgcttcctgggttcacgccattctctggcctcagcctcctgagtagctgggactacaggcgcccgccaccacgcctggctgtttttgtatttttagtagaaacggggtttcaccatgttagccaggatggtctcgatcttctgacctcgtgatccacccgcctcggcctcccaaagtgctgggattacaggcgtgagccaccatgcccgaccgccctggcggtgtttttttgttttgtcttgttttgtttttttggttggttggtgttttttttttttgtttagagacagggtctctgttgcccaggctagagtgcaggggcgcaatcatggctcactgcaacctcgacctcctgggctcaagtgatccttccacctcagcctcctgagtagctgggaccacaagccggtgtcatcacaccccagctaataattttgttttttattttgtagagacagggttttgccacgttgtccaggctgatcttgaactcttgtcctcaagtgatcctcctgcctcagcctcccaaagtgctgggattataggcgtgagccaccacgcttggccttgttttgtttttaattaatagactttatgttttttgagcaactttaggtttctaggaaaattgagcagaaagtacagcaagttcccttgtgcccccatggcctcagtttcccatgaccttagttccgctgccctcagtttcccctgctgctcctgtcttgccttggcgtgtctgtccctactgcagccaggctgatctgtcccagcgcacctcactcttgcctccagccatgggcacggcctcatcgcgtctgcgttccccgctggaggccttgtggaggccctcacccatggcagcttttgccttccctctagagtttaaagaaacccattatccccaaagagtttgggggcaaagtccccaccgtcatccgccagcgctatctcaacctgttcatcgaggagtgtctcaagttctgtacctccaaccaggaggccatagagaaggtgaggtcctggagttcctatctggccggtcgggtggggactaggggtccagggtggtccccagacatcccccggcctctcagccgcagctgtgacccggagctgcctgggagagatgcaagtccccgaccccatggcgaccccaccgctggggctccccggcaccaggcaggcatggcctcagctgggcaccgcctgtcccccaggcactgaacgaggagaaggtggcctatgaccgcagccccagcaagaacatctacctgaatgtggccgtgaacaccctcaagaagctcaggggcctggcccccagcgctgtgcccggcctcagcagtgagtcctggcgggtgggcgggggaggctcagggttgctcttggggtggcagctgggctgggaccctcgctgggaccttcacagccctgagctcagccacagtctcagacaaaaggaaagcgcggtgctgtgggggggctgcctgctgcctggttcccaggcttctgtgtaggacggacctggccctggtgtcctcgctgtcagccgccttcctccgctgagtggggtctccaagccgagccgaggggccgcctgctaatggagctgcggcagcttcttcaaagcaggaggcccagggctgggcgagctccatgcattaagctctggggaggaagaaagcggagacctgggcgtttcattgcagcctctccaggctgcattaagctatcaccggcccctgcccccgtccccgcctgcattagcactcggaggggccctgggttggcgtcgcaggctgggtggcccatgaaggctcaaagccctcgaaagccattagatcccccgtgctgttctccccgcccttcccccttcgcttgaggggaggggacgaagactttgggtgtggggcctccgtgcagctctggggcctgcagagctggcggctgccctgcgtccctggctcaccgcatgtctgcctctcctgttcgggtcaggctggaacccggggtcagtggggtgctgtcccagaaagggggagttgaggcagaggtctgaggagggcagggtgggtgggagagcaggcggggcaggggtctgagccagctacttcacaccctcctcccctccctcccttccttccagaaaccagtggccgcagggttgtgtcccacgaggtggtgttggggggcaggttggccgccaagaccagcttctcgctcagccgtccaagcagcccccgggtggaggacctgaaaggtaaggccctgcccctgctctgccacacggtgcttcgtgggcctctgccggcccagcccctgctgtgccacacggtgcttcgtgggcccctgccggcccagccgcctttcccggtggtgtctaccgccccgtgggccatcccaggcaggggctgaccactgtgcctgtccacaggggctgccctgtacagccgcctcagggagtacctgctcacccaggaccagctcaaggagaacggctaccccttcccgcacccagagcggcccgggggcgcaatcatcttcacagctgaggagaagaggcccaaggactgtgagtcgctggcctgcgacggcctaggtgggcaggtgcgggatgtgggcaaggccgggcatgcgggccccagcgtgagcctcagcttccacctgggtccccacccacagcttcctgcaggacctgctgccgctgtggcaccgagtac

SEQ ID NO: 13675 - DNA, 718 bp, Homo sapiens
taccaccaccatcatccctaagcgaatcgcccacagtccatccttacagagtttaaagaaacccattatccccaaagagtttgggggcaaagtccccaccgtcatccgccagcgctatctcaacctgttcatcgaggagtgtctcaagttctgtacctccaaccaggaggccatagagaagccgcagctgtgacccggagctgcctgggagagatgcaagtccccgaccccatggcgaccccaccgctggggctccccggcaccaggcaggcatggcctcagctgggcaccgcctgtcccccaggcactgaacgaggagaaggtggcctatgaccgcagccccagcaagaacatctacctgaatgtggccgtgaacaccctcaagaagctcaggggcctggcccccagcgctgtgcccggcctcagcaaaaccagtggccgcagggttgtgtcccacgaggtggtgttggggggcaggttggccgccaagaccagcttctcgctcagccgtccaagcagcccccgggtggaggacctgaaaggggctgccctgtacagccgcctcagggagtacctgctcacccaggaccagctcaaggagaacggctaccccttcccgcacccagagcggcccgggggcgcaatcatcttcacagctgaggagaagaggcccaaggactcttcctgcaggacctgctgccgctgtggcaccgagtac

SEQ ID NO: 13676 - DNA, 349 bp, Homo sapiens
tgcgcaggccccacgtgcgctgatctctgccgctgcccacaggtcatccacagcaccgtggtggacacgtctgtgctcttcccccaccgcctgggcctcccctacaagcggtccctgcggaacctcatggccgactacctcagacagatcatccaggacaatggtgagtgccggtgcctgccctggggccgtccctgcgcaggggccgggtgctcaccgcatctgccccgcagtggatgggcacagctccagcgaggacgccggcgcctgcatgcacctggtgatctggaaggttcgagaagacgccaagaccaagcgatgacgcctgcccgcctcccacccgcctctc

SEQ ID NO: 13677 - DNA, 279 bp, Homo sapiens
tgcgcaggccccacgtgcgctgatctctgccgctgcccacaggtcatccacagcaccgtggtggacacgtctgtgctcttcccccaccgcctgggcctcccctacaagcggtccctgcggaacctcatggccgactacctcagacagatcatccaggacaatgtggatgggcacagctccagcgaggacgccggcgcctgcatgcacctggtgatctggaaggttcgagaagacgccaagaccaagcgatgacgcctgcccgcctcccacccgcctctc

SEQ ID NO: 13678 - DNA, 20799 bp, Homo sapiens
gaggcgcgggcggcggcgaccgcggcgccagtgagggggccctggggcccgggcggctccgggccggggccccgccgcgggacggaccatgctacgctccactggcttcttccgggccattgactgcccctattggtctggggcgcccggggggccctgccggcggccctactgccacttccggcaccgcggggcccggggctccggcgcgcccggtgacggcggagaggcgccccccgcagcaggtaatgcccgcccgcctgcttgccttgggctcggctcccctgcccgggtctggaccccaccccggtcccgcccggggtccccgttctcggcccagcctcctccccacacgttcgcgggcgacggttttcccagtcgggaccggaaccacccaccctgggacccggtgcaaagcactagatgtccctaagccttcgtcttcacgagtgtgaaatgtcaactaggaggacgcgtcctgccagggctgtctagagggcggagtgcgagcgcatgttgagtaccgggcaccgggcctgacacaagggggctcgggagacgggcgcggccggcgctaggcaggtcctggactcctcctgcccctgattggcgcccgccgcttcccggaccccatgtgcttgtggccgcccttgtttatttccatgacgtttcctccggccgcgcctctggcagcggccacctcagtctccagtcgttgagttaggatggtccgaggatcgtctcttgtgtttgtcgagccctgtgtccagcatgactggcagggaggaagtcaaagcttactcgagtgggctccgaggaattccatgcttttggtcgggcagaggacgttggtggactccacctcacagcgtcatggtggttttcatcgtcatggcagcgtttcttggaggagatgtgggatttggattggagaaaaagagggacatcgcaaggaaagtcgtggagggagggttatcgagtgtgatgtcattcagactcccctgttacctctgtcccttgatagtggctctctgcttcacccagcccctgacttccttcgtcccagatttcctcattgggcgtgagtttcaagcactgtttttactttaaccatgaaacagtctcagctcagaaccttttcctgcaaaagagaaacatcttctctaggatttaagaataggtttattttcctgttttgccagaaaaggtagcatttttttctgatttccctgataagtgtgcttgggacacctgcacctgtgggcggttgtttgcaggtggacagatgcaagcaatcacttgtcagctccccacagcccagcgtcttcgctgtgtttgaggcgggggattcagagctgcgtacgatgccggctgtgctctcagggacctgccgacagctgtgcctacagatcccgtagcataggtcgtgatgtcctgggagcacgcagccggctttggcgggggctgggagttggtgaagaaggcaacgcgtgggagaggcttctcggaggctgtgacaccagactcacgatgctcattttaaccctatttttagagacagggtctcactctatagtccaggctggagtgcagtggtgcgatcacagctctttgaggcctcgacctcctgggctcaagggatcctcctgcctgaacctcctgagtagctgggactatgggcggcgggtgccaccaagcctggctaactttgtatgttttcgtggagatagggtctcgctatgttgtccaggcttgtctcaaaactcctggcctcgagccgacctcctgcttcggcctcccaaagtgctggggttacaggtgtgagctactgcacccggcgcaagtcaggcttatgatatctgtctgcatcccaaatggctcatttgtttcccaaaggcttatttttgagggtccctttggtgatgtcgtcttcctgtctgccccccgttcctatgggaaaaaggcagctgcctgcctcttaccatggcgtgtctgcatttcccttttgctggtgagaatgaactccttttcccatctctggtggggtggtagggcttcttgttactgtctggtagaagactgcctccccccgcagaaggcaggatccatcttccttgcggtgaggtttctctgaccctctgtttccgcctccgtgacatgttcatcaggctgccctctgaggacagggggggatgcatgtcccatgtccacacctccagatttacacacacccagtttcctatgagatttgaagaggctggcgtgatctagcctttgccatgtcttctcaaggggattttagggtgcacagggcagcggcctccagagaggagatagacaggaacgctggcctcccaggattgagagtggacagaggttcaggtgaaaagccctcagctagccctggagcacctgtggggccatgctctgtgctggacacgcgctgcatggtgaccctgtgagctatttgctgccggtggggaaacggaggcttatcgaggaacgtgttttgcccatactaccacctggccagggcagggctggagcctccagggcctctgggagaaggagagggcatctgatgagggcaccaaggcaggcagggttgggaggcttggcggagctgcgacgggaacaggaaggtggctggtgctcctgggccctgggtcacaggctcagcgggtcattggcgaccttgagcagcactgctgaaggactcaggtttccttctgggctcttatccctggacctgctcagccattttatttaatgaattaatttttgagacagggtctcactttatcacccaggctggagtgcagtggtgcgatcacagcttactgcagcctcgacctcctggactcaagggatccacctggctcagcctcctgactagctgagaccacaggcatgtgacatcacacctcgctaatgtttaaaatttttgccgagacggggtctcactttgttgcccatgctggtcttgagctcctggactcaagcgatcctctctcctcagcctcctgaagtgctgggatgacaggcgtgaagcaccgcgctgggctgcacagccatttcagagccggctggacctgcccagggtggcttggagggatggtccagcagcccttacggcgggcaccgtgtagccctgggacgcagggatgtgcatccccggcctagaggggcacgttctatcccagccttgtgagttgggaatgagcgttactatccccccagtggccgctctctgctgcctgggccttggctgcagcctggtggtaggtgaggggcctcggttgtctatgtggagtgggcagggctagatcccaccttcctcccatctgacctcagaacccaggcctctgcccactgccccgcactccctgtggtgtctcagggagtctgtgtcctactgagaggcaggacactgtcttccaggagagggaacccttccggggaggattgcaggaaagtccagggctctccagaggtgcggtgggccccagctcagggcttcacagctccggcaggaacgtgctcccagatgatgcttctcctgagggaggcagaggctgagggcaccacgttgaggggatgctagtgctgcgccacaggctgactcaggccccagcaggacagtcccaggcctggggaaggggccatcctatactgcaaagtgagcggcagacgtgtgtgcggggcgcacagctcctgccctcggggatcccgcagtcgggttcaggatctggcagcccggtgccagtggttctgggtggggctgttggcggcgtcccagctggggctccaggcgactctccagaactgcatctgtagagggcaggagtcctggggtagaggcgctcagggagcagccccaggtacatggggagccctgaagcccacccactgtgtacccagtatctactgaagcccacccaccgtgtacccaatatctcctgaagcccagccaccatgtacccagtatctcctgagccttctagcagagtcgggtcaggcaggggtcctcctccttctggctcttcagatgtggcccctcacatgggctctggggtccctacctcttgacttggccactaccacagcagtactgggcggactctgcctgtgacccccaaacagcagtgggagtggctcttcccagtttacagatgaggaaactgaggcccagcgccgggaggctgctcacctgtgtacgcgtggctggtaactggcagtgctgggttggatgtgggtgggccggggccctgcctgcctcctctgccgtttttgctgccagcctctgtgggctgggcacagaagggaacttgaaaccttccaaggatgggcctgaagcaggcctggctctccggtgtcggtgacagcctcccatacccctgctaggcaggtgagccctgggatcctactgatctgttagggcttgccagctctcctcggaaactctgaggccccgagtcaggcgagaagggagaaggaggccaagaatggcgcctcgctgcagaggatggcttgccttcatttcctctggcctctcaggagggtcaggagctcccgctggctgcgtcctgtgctgcctcctcctggtggatgggagacagccggctttccgtggggcagtgaaggcaccgtctgaccacctgtgtcaccttcagagacgtgacagtgtgtgctctcctcggtccgacttttcatcctcagtgagccgcgtccaggaaggaatggactctaggggagaacccccgcagccagcagtattgtcttttggttccccaggcctgaccagggcgtatgaggacccgggggtgattttaccagcgggtggcaggtgggcaatcgggccaccggggccgcctgcctgcctggcctggagtggcagctatggagcttgctggagggacggttggtgctagggacactgggggccagattgtcgtctggtgggctgtcctttgcgttgtaggatgttgagcagcgtccctgggcttccctgaccccagtggtgacaaccagcggtggtgctgaggccgtttctttttcagccctcgccggcgagcctgcgagtccagctgcggctctgggccctggggagctgggaccctccgggcggggggttgaagctttgcccagctgtggctctgggccctggggagctgggaccctccgggcggggggttgaagctttgcccagctgcggctctgggcccggggagctgggaccctccgggctgggggttgaagcttcgcccagctgcggctctgggcccggggagctgggaccctccgggcggggggttgaagctttgccctggcctcgaggaggaggagccctcccccacactcctaccacagagtgggtggctctgctgccccgtgactcttgatgttcctgtgtggagggggttagaggaaaggggcctggggtttccagagcagccgccttcttgcagatgctggcaggattgtgctggcagctctcccccaggtggatggcgatgggaaaagcgctgggttcccagggcctgggggcctgtccgtgttgccacgggtctctgggtgctttacttttgaaggtactattttctggcctggggaaatgtttgttttagaaacatcagagaatacggaagagccagaggagaagtgtggcttcctttgccgagtccggcaccaggccgcttgccgggcctcctccagactccacaccagaggtcccgggcttgctgtgcttgagccatggctgggaccctgcctcacagatgaggttggattctgtttttttgggggggcttttcccaaggttctgaggtcctcacctgacttccggagcgcctgggcagctttgaaaacctggctgctgggcccggagctgcctccaggcgtgggccgtgccagtcgaggctggttttggtattcatattttaggattctttgcttaggtcttcagtagagcagtgactgatcccgacagggcggttctgcaccttgggaatgttaggagatgtctggagatgttttggttgccagtttgggggtgcaggcacagagagggcagaggccaggggcactgctcagcacccttcagtgctggggacaaccccacagacagagatctagcttggggcagtagtcctgaggatgaggatgccggtctggcggccccgcctgctgtttttgtgttttctttgctgctgctgctttttttttttttttttgcaacggaatctggctctgtcgtctaggctgttggagtgcagtggctccatcttagcttcctgtaacctccgcctcctggattcaagtgattcttctgcctcagtgtcccaggtagctgggattacaggcacctgctaccacgcctggctaatttttgtatttttagtagagatggggtttcaccatgttggccaggctggtctcgaactcctggcctcaagtgatccacccgcctcagcctcccaaagtgctgggattacaagcgtgagccactgtgctgggcctgtttttgtgttttcgagagggatggctgagctggcgctctgcctgtagggagaggcagagaccctgagaagcaccgtccctgcccccagagcctgagatgggagaggcagagcagctcgctggggctggggtcagcggggacaagcgtgcctgctgggaggggttccggggactcttgcagtgcctgagccgctccccagagcgctccccccagagccctgtgcagctttaccgtctcctccagggactgcagactggaggttcaggtgccagtggccggcctctgtccctctggagaccgtaccccggaatgaaggcgtcttgcttggctttctgtggggcagagctcgctaggaaggccccggcctcctcctgctgggcgttacccccttgagcctgttgcctcctgaacctccctcggcctctgcgagctcttctgcacgatggggtcgtggcatctgagtgtgacgggaagcgtcgtgcgggctgtgctgtagcaggcctcactttgacgagaaaactctgtcctcctccgccctcctccccaccctcagaatcccttctgcaaagcaatccctagagaggagcaggcaggtttccggggagcgctgggtgcgcccggccgtggcttgttccttacgctgtccgcgcagtgggtagattctgttggtatgatctgctgcagaacaaaaagcaaaaacctgaaaagaaaataaacagggtagaagggagactgtcagggcaatcctgggggtccctgagcctcacggggacctctcgagttgccattcctcttcctcctctaacagccaagtcctctgggacccttggaggagccgcatgtgcactggctgtttcggggcgatccctcccttaggctccgagaggtttttgggaacggctgcgaggacggagcgcctcccgtcccatgacaggctgcgtgcctggagcccggggttctgggacctgcccctgcttccggcctcaggaaaggagtggttgggggaggactcgggacgagctgtgggctgagcctggacacacacaccacaggacttcagtgttctctgtaaagccaggagctggtcctggtgccctccaaggccctgtctgggtccatctagactcagtgtctgtggcgccaggctgaggggactcgggaagcagaagcggagggggtgatgtggggtgggcccgggtccaggagacagggcagctgtcacttggagttgcagggagtggaggggtgacgtggggcgggcccgggtgtcactcagagttgcaggggggtggggcgagtgtttccaaacacaggattactgggctgggttttggaggatgaataggagtttgcctgtggctggaagtgggattagggctgtgggctctggggatggagacagctcgaggaaagcctgggatgttctcctgctctgggcttggggctgcttgggagcttgccgccgatggggctcactgttgatatgctgtctcatctgtccccagcctgggagcgctcctgcggttgggcagtctgcgattctcagctttctggagtctcttcctgttcccacagagactcatgtctggagagtcggtgtgctgcaggtgtggaggggcccgtgcctctgggtcagtgtttccttccccttcccactttccttccttcctcagatctctgcagacacctgccctgggccagctccgtcgacgctggggtgctcagaagagcctggcagggggcagggccaggaaggtggcagagagcgtgtgcttgggggtgtgggcctggcgtgcactccaggcgtatccccgccctgtggcttcccagcctgtccatttgtcctggcgacaggtccatccccaccctgttaacggtcacgggtcacagtccatttttctgagacccctccctcctcctctcacagtggctcagaggccctcagagaccaaaagggagccagcactgcctcaggagcaggccctagggagacaggatctggaagccatggaagtgggcctgcgcagtcctgagttggccaccgccccgtgcaccacggccgaggaggtggagtgaggtgagggctccaccatgccttccacctctgtatcccaggcactatgccaggcactgctgcttctgcagggaggacttcggagggctgcctggaggaagtggactttggggaagtggatgagacagagagggagggccctgccctttgtgccctgcaggctgcgtgccctctctgaggtcctgggcaggtattcagagaacatgtgctggaggaatgaatgatggggccggggtcggcccacattgccagccagcaccccgtccccccagcatctgcacacaggtcaccaagtaacaaaaacagcttgtgcttgcagtcaccctggtgtgtgggttcctccttaggcgccacggcacccatcctaggaacagcctgtgaacccctggctgaggggcagcgccccgtggaggtgcccactccagcttctctgtgagcccctggaagaggctgcagggctcctggatgcttttagtcctctgtgcctgacggggagcacaggagtcccagaaacacccactgggaaatgtcctttggggacagaaaaggccctgggatgaggaggagctgagagctggactctttttttttttttttggagatagagtctcgctctgtcgccctggctggagtgcagtggcgtgatcttggctcactgcaacttccgctgctgggttcaagtgatacttttgcctcagcctcccgagtagctgggattacaggagcacgccgccacgcccagctaattttttgtattttagtagagacagagtttcaccgtgttgcccaggctggtctcaaactcctgagctcaaggcagtccgcccgcctcagctttccgaagtgctgggattataggcgtgagccaccgtgcccagctgctgatttttgtatttttagtagacacagggtttcaccatgttgcccaggctggtctcgaactcctgggctcaagagatccaccagccttgtcctcccaagtgctggggttacaggcgtgagctaccgtgcccggctgagagctggactcttaacttactctgtgtggaccatgaaagtggctcacagccaaggtgggctcttggcagggatggagaggcatagggggagaaggtcccgctggctcctccctgccggttcttgtcctttgccatttgtacccttctgtttcagtttttttttttttttgaaaaggagtctcgccctgtcacccaggctggagagcaatgtcacgatctcggctcaccgcaacgtccgcctcccgagttcaaacgattctcctgcctcagcctcccgagtagctgggattacaggcgtgagctactgcgcccaggcatgggattacctgggattacaggcatgtgccaccacagctggctaattttgtatttttttaagtagagacaggatttctgcatgttgctcaggctggtctcgaactcccaacctcaggtgatccgcccgcttcgactttccaaagtgctgggattacaggtgtgagccaccacgcccagctggtttttttttttttttttgagatggagtttcgttcttgttgcccaggctggagtgcggtggcgccatctcagctcactgcagactccaccttccgggttcaagcaattctcctgcctcagcctcctgagtagctggggttataggcacccccacacccggctaattttttgtagttttagtagggacggggtttccccatgttggccaggctggtctcaaactcctcacctcaaatcatccacctgcctcggccttgggctcagcctcccagagcgcggggattagagccgtgagctactgcgcccagcctgtttctacattgttttgaaaggcagtgacctctgtcctggttaccgtccctgtcccctagcctcgagctgtaagccttgggacagcagcgcgtccagtcatggcatgtggggacggccgccccatgaggtgaataaatgcccaggacgccccagagagcagagctggtggtccccggtcaggccgggacctttttctttttctcccctggaccctgccgtgtggctccacctgctgggcggtcctggcactgcacactgcgctgtcgaggtggggagggcggtgccttggagcagaggggaggctcggatcgcagccctgggggtcgaggagaaccctgggggcagtggggtagaccccaggtgccgctgctgcaggcacagcccagcctccacagcaagctctgagacctgggtggagtctggtgtggggggtggggcagagctgggccaccttggatttcagagagggtattggaagctgctgggtggtggaggtccaggcccccggcactggctggacttttcctcgaagccctctccaggtgaccctgtttctgccccgtgtggtctaggagctgtgggacctcctctgggtgcagagtgctggtccctttgcctctgagcagcgggttcctatctgtccagtgggctgtgcatggagggccccgggcgcccgcatgtccaaggatggggctggaggacgtcccactgtgagggttggaggggaggccccaggagcagggacccccagagtggacgtatggccatttgtggggaccttatggttactctgccgtccgcaggaggtggacttcaggggtgctgtcctccagacccctcttcccagagggtctgttatgggatgggcgctcccgtggacacaaccagcccctgccttgcgcttcgcgagggtcagccccgtgccttctctgccgctgtggctgttttgggaatgtcctcttctgtctccaccttcaaagcctcaggccgcccagatggctcccccaggggctaggttgggggtagtcttgcttatctcatgccgcagtgtcaggcttatcttttttgtccagctaagccccaggcgggagggactgtctgtttccatctggggtctctgcctggcctgttctgggccagcatgcggggcccactgcctgggctggaggggccagtcctgctgatgcctggttgcgttgagagccctgcgggcccaccgaacggtgtccggagcaggggctgggcctgccgggttcttttttttttttttttttttttttgagacagtcttgctctgttgcccaggctgcagtgcgatggcgtaatcttggctcaccgcagtctccgcctcccgggttcaagtgattctcctgtctcagcctcccaagtagctgggactataggcgcctgccgccacgcccggctaatttgtgttttcttagtagagacggggttttaccttattgtccaggctggtctcgaactcctgacctcaggtgatccacccgtctcggcctcctacagtgctgggattacaggcatgagccatcgtgtccagccagcctgccgggttctttagagccactgagtctccccgtctgggtgggaggggcctggggctccttgtggggctaggagctgccggctctcgctggcactgggtgtcctcatctttgaaatgggctgactgagagaagacaggagtttggacgggtctcactagagaacgttctggaagttcaggttgggatcttcgtgctccatgatcttgtcatttttgctgcctttcagtctccgtgtggggttggagctcatgccaggttctccccattgctggggacaggacagctgtgtgggtggattgagtgtggtggggcgggggcagtgggagcagagaggagagtggatgcccagggtgaggggtttctgggccaagggaaggtttgggggccaggagatggccttgggcagatagtgctggtcccaggccccacacctagaaccctgggaagaaatatcatctttgtcatccagcccgtcccggggctgcagggcactggtctcaggagatgcggtcaggatgggtggtgtagggagtgggctctctcctaggccgggacaaggctgggctgcgttgccctgggctgagccctggctggagaggctggggaagatagccagccaggcgttgtggcctctcaggaccactggggctgggtggtacctcccagtcctggccttggggtgaagcagggaggaaggggcagctcccaggcctctggaggtaggcttttcctgtcagccaattcaccatgtttcccagaaacagactgacctgggccacatccaggaaggagcccacctgctcctatccaaagtaattcccagccgtgggacggggcctggacgggcccctcctacttccagagtcggcattcatttatgtatgtgtgtgtgtatgtatgtatgtatgtgtgtatgcatgtatagctctgtcgcccaggttggagtgcagtggtgcgttctcggctcactgcaacctccacttcccaggtttaggtgattctcctgcctcagcttcccgactagctgggattacaggcgcctgccaccaggcctggctaatttttttttgtattttttagtagaggtggagtttcaccatgttggccaggctggtttcgaactcctgacctcggtgatcctcccgcctccgcctcccaaagtgctagcattacaagtgtgagccaccacgcctggcccaaactcggcctttagatgtgaccccctgggtgggctcccagggcacctagcagcatgcacatgccaccctggggcctttccagtcctgacaggtacccagatccaaccctctgaggcatggtgggacagggaggtccagggaggcagtggtgtgtaccagcttcaggtgacctttcaggggctcagcacgccgtaccccctgttctgagctgcaggcagccatggccgagccccaggcaacttcctgtgtgaaacttccagacctggctggagcgcccaggccaggatgctgccttccagcaccagtgggtcacaggctgcagggtgggggagcccagtgaccacagggaggagaggccgtggtgcagatcctgatctcagtcttctcggacccgcctagcatgcctgctttctttttggtgcagtctttgtggaggtggtagcagcctccacccgggagtgaaaatgctgaaaccccctctgcagagtgtgccctccggcctccaggtgcccctgctctttcccatctgttggctaaaggctggggcaggtttcacagcccttaaaagacaagcagtgctttgggaggccgaggcgagaagaccgcttgagcttagaagtttgagaccagcctgggcaattacagcgagacccccgtctctaccaaaaaaagaaaagaattagctggatgtggtggtgcacgcaggtggtcccagctacttgcgaggctgaggcgggaggatcgctggagccggggaggcaaagcttcagcgagccatcatggtaccactgcactccagcctgggcaatgcctgtctccacaaaacaacaaaacaagtactcacacaggcttccagttagaaagacaagcccacgtcccccagattggacccttatcacctgtcctgcgctctgcttgggggcctggctccactcctgggaggcaggtgctattccttccaagaccttccaaaagcaccttttggggaaatggtctctcctttcagagtccacaatgtccagaggtctgaatttccttcctttgggaagggctcgcgggtgtctgctggctggtgtgtgtattgcctgtgactcttggctcccctgggctgggttgatcttgcaggctgtgtcttagagccctggggtccaggacaaggaggtggaagcccctgagtggagtcccttatccttagccccttagagatgcctcagtcccctccacccccgcctgccctcctggggcccagtctcactgctgcccacccctgcctggggaggagagccttcccgttaggcgggctcttcctcctctctgcatccccgttagctggagccttgggaggggagaccagtgtctccctgacctggccttgctcctcctcagtaattgtgctctgtcacctccccttcatgaatctctgcagctcacgccacagtggccttggcctggcccctccacgtcactgggcagccgggcttccggggctgggggagggctggcactagttgccctgttcaccaggcgggtggcagggtggcgtgctctgcagccggctgggtcagggaggagccggagcctcccccagtgaagtgggccgggagggcgcccttgagctgctgctggcctccgcagccctccccctgggtgggggctgacacccagccccagccggccgtttccctgccgggagcatcctcctggcctggcagctgtccctccccgcacagaggaactggcagccacagttgctgatcctagttgggtgccctcgctgactcccagggtccttggctgtgagatggtgccagaatgggcccctctgcgcctgctgggcacatggggtgacgtttcctggaaatgccttggctgtagcctggcacaggcaaagaagaacctgtggcttctgtgtgatgttcccctgcctgcccgtacctcgtggccctccacacagtcccgcggagttccgagtggtccaaaacagacacacggatccttcctcttgtctaaatgctacttaattttatttgttttagagacaggatcttgctctgttgcccaggctggaatgcggtggtgtgatcacagctcattgaagccttgacctcttaggctcaagagatcctcccacctcagccttccaagtagctgggaccacaggcatgcaaccatcacacccagctcattttttgtatttttttgtagagacggggtctcgccgtgttgcctaggctggtcttgaactcaagcagtctgctcatcttggccttccaaagtgctgggattacaggcgtgagccactgagcctggcactaagtgtaatttttttttttttttttttttttgagacagagtcttgctctgtcgccaggctggagtgtagtggtgtgatcttggctcactgcaacctctgcctcctgggttcaagcgattctcctgcctcagcctcctcagtagctgggattacaggtgcacgcccccatgcctggctaattttgtatttttagtagagatggggtttcaccatgttggccaggatggtcttgaactcctgagctggtgatctgcccgccttggtctcccaaagtgctgggatgacaggcgtgagccaccgtgcctgggatgacaggcgtgagccaccgtgctgggatgacaggcgtgagccaccgtgcctggtccctaaatgtaattttaaagatgggcacaacactgctgtgatttcaagggaaaggcggcagctgcccgtgaccaggcctcctcccacctcctctgcagcctccgggtcccggcctcccgctgtccctgcagggttcccgggaacaggaggggccttccgccttcgcaggtacaggcagcgggcagctgttttccactgcactttcatcacccggtgaggctgcattcgtccccgtgggccttaaagcagcacactctctctcagcgctgggctgggaagtccaaagtcagcctcgctgggctcaagtcaagctgtgggcaggactgggcctcccgaaggcttccggggagagtcagtgcccgcctttcccagcatctggaggcacctgcatccctcggctcagggcgccttcctccccttcaaacccacagcacagccttttccagtctctctgactctcaccctcctgcctccctctttaaaggaccctgtgaggacactgggttcccggataatgcaagatgttcacccaccctcagggtcctttgttcaagtcgcacctgcagtctattggctgagtgaggtggcctggccacaggtcccagggattaggatggggacttacctggggaggcttttgttctgctggtgggtgtgtctcgggggagcagcttgggaaaccagccatttctttttttctttttctttttctttcttttttttttttttttttttttgagatggagttttgctcttgttgcccaggatagagtgcaatggctcaatcttggctcactgcaacttccgcctcccaggttcaagcgattctcttgcctcagcctcccgagtagctgggattacaggcatgggtcaccacggctgggtaatttttttgtatttttagtagagatggggtttttccttgttggtcaggctggtctcgaactcctgacctcaggtgatccgcccgcctcagcctcccaaagtgctgggattacaggtgtgagccaccacaaccggccgaaaccagccatttctttcttatgcctgctggggcttgagggggtgtgggtgggggccataggggaagcctccagttctgttgctgttctctgcgtcgcccacagtgggaggtcttgtgcctgcctccccttggctgcgtccagccatttctctgcacggaagtcttagcacgctgtgggggtcgatctccaggtgggccgaagggcaggcaggttttctgagtggaagaaacacacctgaggcccgaccttcagacaagctgcacgttcagtcagaatcaagtcagagccaagtggcgtcttggtgcgggcaggttcccatggggctgttgccttttgctacatggtgtcacagctccttatcagcctgtcggggatgtgtgtcagcattcacgtccctcttgggcagttggtgttgggtgcagcataaatgaaggccagattgcatttgctgtaccccatgggactgcgggcttggtgtgggcccgtgcgcctttgttggaatctgatctcactgggtttgtggagctgcttttcaaaggtgagagtgtgcaacattccttgcccctcttcttccccatagcagtgtgacttggaggtccctccagggcgcacgcctcccccttaaccacaggtgacctgcgtttcggcttctaggtcatctcctgcgttatttattgttgtgtttttgcagtgaaggctgcaccagacgcatctgtacctgccctgtgcggtctgtctgtggcacgggttctgaggattccgagtctgaaggtggtggtgttgaagctgcatgggatggttgcgaaactgctctgcaagatctcggcctgtccatggccccctcagtgacgggcaagggagatttcaccccatctagagccccatttgccatctaaggggatataccatctacaggttccaggaattaggacgcagacgtctttggcgccatttcctgccaactccagaggatcagacctgttgacctttagagacctttagagatgttacggaattacattcagtggaactttattttatttttttaagagctggggtcttgttttgttgtccaggccagagtgcagaggcacaatcctggctcgctgcagcctcaagcccctgggctcaagtgattctcccactttagcctcccacatagctaggagcacaggtgtgcatcaccatgctcagcttatttttaagtatttttttaagagatgggatctgtgtcatccaggctggtcttaaactcctgagctcaagcagtatcctcccgcctcagcctcccaaagtgctgagatgatcggcgtgagccactgtgcctggccgtgctcagtagaatttctaatggtcaacttccaagtttctggagtaaatatttgaacttggtttttattgcttcgctggaatactgggctccacttgctcatgttttctttagactccttcggcctgtccccacgggaggcttctgtggttctgacttctgtgctgacgttggtggcattgaggttgtgagggtctgctacactatgttctggaaccacgtaaataacatgcgagtctcatgttcccagctgccccccgggaagacatttcagccgtgtgctttaagccaggcacagcagcttgggctatagtcccagctatcttggaggctgaggtgggaggattgcttgagtctacgagttcaaagccagcctggccaatatggtgagactccacctctacaaatttttttttgttgagacggggtttcactcttgtcgcgcaggctggagtgcaatggtgtgatctcggctcaccgaaacctctgcctcccaggttcaagcgattctcctgcctcagcctcctgagtagctgggattacaggcatgcgccaccacgcccggctaattttgtatttttagtagagacggggtttctccatgtcggtctggctggtcttgaactcccgacctcaggtgatccgcccgccttggcctcccaaaatgttgggattacaggcgtgcgccaccgcgcccagctacaaaaagttttgaaattaaaaaattaatttaaagtaggccaggtgcagtggatcacttgaggtcaggagttcgagactggccaacatggtgaaaccccatctctactaaaaatacaaaaattagctgggtgtgatggcgcacgcctgtaatcccagctacttggggggctgaggcaggaggtttgcttgaactcgggagatagaggctgcggtgagccaagatcgcaccactatactccagcttgggcagcagagagactgtctcaaaaaaaaaaaatcttcctgtggattttgcagggtggcccatcaactgggcatgtccccatcccccggccctgctcagccacatcaccgcaggcacaccgccaccacaccaccgctggcacactgctggcacacctccgccacaccgcgggcacactgctggctgggtggggccgtgttggctgaggaagggctctcctgtgtccaccgtcaggctgtggttgtcggcccagcccagtcctgcctcagcccggcaccctgaatgctgggagctccacacccgcctgccccggggagttccagcctgtcgagtgtccaccccaccatggtcattgtgcgcatttcatgagccgtgtgagggagcctccagtacccagggagctgtgtgtcacgcagcccaggcccatccagcgcccattggtcagggcaaggcggggcccggcacagggcctgagatggcgccatggcctgtacccagctgggcaccccagagccttggcgggcgccagtgcgtggtgggtttcggaggcaggtctcttcccttccctgcagtttgagaccggggccgcccccatgctgcgggctcctctccggcaggctggtcacagctgtgctctctgttcccttcagggctgggttacgacccctacaaccctgagctgcccaagccccccgcgcagagggagaatggcaccctgggcctgggggaggagccgcgcccggatgtgctggagttggagctggtcaaccaggccatcgaggccgtgcgcagtgaggtggagctggagcagcggcgctaccgggagctgctggagacgacccgtgagcaccgctccgccgaggcccccgccctggcgccccgcggccccaacgccagccccactgtgggcccggacgaggatgccttcccactggccttcgactacagccccggcagccacggcctattaagccctgatgccggctaccagcccaccccactggccgcccctgccgagccgggcagcaagtactcgctggcgtccctggacaggggtcagggcagaggtggagggggtggcggtgccctggaatacgtccccaaggctgtgagccagccccggcggcacagccgccccgttcccagtggcaagtacgtggtggacaactccaggccacccacagacctggagtatgaccctctctccaactactcggcccggcacctcagcagggccagctcccgggatgagcgggccgccaagcggccccggggctcccgcggcagtgagccctacacacctgctcccaagaagctctgtgacccctttggcagttgcgatgcaaggttctcagactcagaagatgaggccgccacggtcccaggtaacgagcccaccacggccagcacccccaaagccagggccgaccctgagatcaaggccaccgggcagccaccctccaaagagggcctggaggccgaggggggcggcctgcgggagaccaaggagacggccgtgcagtgcgacgtgggggacctccagccgcccccagccaagcccgcctccccagcccaggtccagtcctcacaggatgggggctgccccaaggagggaaaacccaagaagaaaaaaa

SEQ ID NO: 13679 - DNA, 1390 bp, Homo sapiens
gaggcgcgggcggcggcgaccgcggcgccagtgagggggccctggggcccgggcggctccgggccggggccccgccgcgggacggaccatgctacgctccactggcttcttccgggccattgactgcccctattggtctggggcgcccggggggccctgccggcggccctactgccacttccggcaccgcggggcccggggctccggcgcgcccggtgacggcggagaggcgccccccgcagcagtgaaggctgcaccagacgcatctgtacctgccctgtgcggtctgtctgtggcacgggttctgaggattccgagtctgaaggtggtggtgttgaagctgcatgggatggttgcgaaactgctctgcaagatctcggcctgtccatggccccctcagtgacggggctgggttacgacccctacaaccctgagctgcccaagccccccgcgcagagggagaatggcaccctgggcctgggggaggagccgcgcccggatgtgctggagttggagctggtcaaccaggccatcgaggccgtgcgcagtgaggtggagctggagcagcggcgctaccgggagctgctggagacgacccgtgagcaccgctccgccgaggcccccgccctggcgccccgcggccccaacgccagccccactgtgggcccggacgaggatgccttcccactggccttcgactacagccccggcagccacggcctattaagccctgatgccggctaccagcccaccccactggccgcccctgccgagccgggcagcaagtactcgctggcgtccctggacaggggtcagggcagaggtggagggggtggcggtgccctggaatacgtccccaaggctgtgagccagccccggcggcacagccgccccgttcccagtggcaagtacgtggtggacaactccaggccacccacagacctggagtatgaccctctctccaactactcggcccggcacctcagcagggccagctcccgggatgagcgggccgccaagcggccccggggctcccgcggcagtgagccctacacacctgctcccaagaagctctgtgacccctttggcagttgcgatgcaaggttctcagactcagaagatgaggccgccacggtcccaggtaacgagcccaccacggccagcacccccaaagccagggccgaccctgagatcaaggccaccgggcagccaccctccaaagagggcctggaggccgaggggggcggcctgcgggagaccaaggagacggccgtgcagtgcgacgtgggggacctccagccgcccccagccaagcccgcctccccagcccaggtccagtcctcacaggatgggggctgccccaaggagggaaaacccaagaagaaaaaaa

SEQ ID NO: 13680 - DNA, 1557 bp, Homo sapiens
tcacagctgaggagaagaggcccaaggactgtgagtcgctggcctgcgacggcctaggtgggcaggtgcgggatgtgggcaaggccgggcatgcgggccccagcgtgagcctcagcttccacctgggtccccacccacagcttcctgcaggacctgctgccgctgtggcaccgagtacctcgtgtcctcttcaggccgctgcatccgggacgaggagtgttattaccactggggacggctgcgccggaaccggggtaaggccttacccgggtccttccccttcccacccatggcccccggaacctgggccctcccttgaggcccccagaactggggtaaggctttacccaggccctccatcccactcagggtccctgggctgcaccgtctttggcagagccggggctagcccttggcctcattttctctccacctgttctttatgcaaaagtaagacaagagctttcccatgacaaggttcaaatgccaccacctgaaaggccctgtgtccctgccttcctgtgcccttggtccatggaaatgtggaggttgctggccccaggagcggaggggcttgtcccacccttggcctggtggttctattcaatcccccaggcaaccacgcagccacgctcagggcacatggccagccttgcacagccctgtggcggcccctaaagccatcgcctcagggatacctggagggtgctgcccggggcagcgctgccaagaggcctctgcagagggcactggtctccctggatccaggcctgggcgtcctggctgccacacgactgccggggcctggtctgcttccagctccaccaagaggctgaggcctcctgtcctcagtcctcactccctagtagggctcggtagatgcaggtggtcagtgccccgggggctgtggagtgggcctggccgggccctgactgtgtgtctgtgtcccctgcagtggccggaggctgggagacccagtacatgtgctgctcggctgccgccggctctgtcggctgccaagtcgcaaaggtgagccctggcgtcccagtcccctctgcctgttctcaacagacttctgcctccccatcgttggtgtggggtctcgggacacagcacagtcctgggctcagggtctgggcccccgggcagcctttcttgtgttacccagagaacgtagcacccgtaggccccaggccctgtccctggccacttcccatcctgggaagccgtcctccctgtgtcttcttggcaagcccccttccccacctgctcaccagggtcccaaccagtgaatgggcgtgatggatggataggatggtcccgaagggctcagagatgtgctgctgctgccacccccgcccccactgcaccccgaagctgccctcacctgccttctccacccccagcaacacgtgcaggatggccggaaggagcgccttgagggcttcgtgaagacctttgagaaagagctctcaggagacacccacccggggatctacgccctggactgcgagatggtgaggctgttctctgcccagcgtcgggttcaggattggg

SEQ ID NO: 13681 - DNA, 369 bp, Homo sapiens
tcacagctgaggagaagaggcccaaggactcttcctgcaggacctgctgccgctgtggcaccgagtacctcgtgtcctcttcaggccgctgcatccgggacgaggagtgttattaccactggggacggctgcgccggaaccgggtggccggaggctgggagacccagtacatgtgctgctcggctgccgccggctctgtcggctgccaagtcgcaaagcaacacgtgcaggatggccggaaggagcgccttgagggcttcgtgaagacctttgagaaagagctctcaggagacacccacccggggatctacgccctggactgcgagatggtgaggctgttctctgcccagcgtcgggttcaggattggg

SEQ ID NO: 13682 - DNA, 3994 bp, Homo sapiens
tggcccccagcgctgtgcccggcctcagcagtgagtcctggcgggtgggcgggggaggctcagggttgctcttggggtggcagctgggctgggaccctcgctgggaccttcacagccctgagctcagccacagtctcagacaaaaggaaagcgcggtgctgtgggggggctgcctgctgcctggttcccaggcttctgtgtaggacggacctggccctggtgtcctcgctgtcagccgccttcctccgctgagtggggtctccaagccgagccgaggggccgcctgctaatggagctgcggcagcttcttcaaagcaggaggcccagggctgggcgagctccatgcattaagctctggggaggaagaaagcggagacctgggcgtttcattgcagcctctccaggctgcattaagctatcaccggcccctgcccccgtccccgcctgcattagcactcggaggggccctgggttggcgtcgcaggctgggtggcccatgaaggctcaaagccctcgaaagccattagatcccccgtgctgttctccccgcccttcccccttcgcttgaggggaggggacgaagactttgggtgtggggcctccgtgcagctctggggcctgcagagctggcggctgccctgcgtccctggctcaccgcatgtctgcctctcctgttcgggtcaggctggaacccggggtcagtggggtgctgtcccagaaagggggagttgaggcagaggtctgaggagggcagggtgggtgggagagcaggcggggcaggggtctgagccagctacttcacaccctcctcccctccctcccttccttccagaaaccagtggccgcagggttgtgtcccacgaggtggtgttggggggcaggttggccgccaagaccagcttctcgctcagccgtccaagcagcccccgggtggaggacctgaaaggtaaggccctgcccctgctctgccacacggtgcttcgtgggcctctgccggcccagcccctgctgtgccacacggtgcttcgtgggcccctgccggcccagccgcctttcccggtggtgtctaccgccccgtgggccatcccaggcaggggctgaccactgtgcctgtccacaggggctgccctgtacagccgcctcagggagtacctgctcacccaggaccagctcaaggagaacggctaccccttcccgcacccagagcggcccgggggcgcaatcatcttcacagctgaggagaagaggcccaaggactgtgagtcgctggcctgcgacggcctaggtgggcaggtgcgggatgtgggcaaggccgggcatgcgggccccagcgtgagcctcagcttccacctgggtccccacccacagcttcctgcaggacctgctgccgctgtggcaccgagtacctcgtgtcctcttcaggccgctgcatccgggacgaggagtgttattaccactggggacggctgcgccggaaccggggtaaggccttacccgggtccttccccttcccacccatggcccccggaacctgggccctcccttgaggcccccagaactggggtaaggctttacccaggccctccatcccactcagggtccctgggctgcaccgtctttggcagagccggggctagcccttggcctcattttctctccacctgttctttatgcaaaagtaagacaagagctttcccatgacaaggttcaaatgccaccacctgaaaggccctgtgtccctgccttcctgtgcccttggtccatggaaatgtggaggttgctggccccaggagcggaggggcttgtcccacccttggcctggtggttctattcaatcccccaggcaaccacgcagccacgctcagggcacatggccagccttgcacagccctgtggcggcccctaaagccatcgcctcagggatacctggagggtgctgcccggggcagcgctgccaagaggcctctgcagagggcactggtctccctggatccaggcctgggcgtcctggctgccacacgactgccggggcctggtctgcttccagctccaccaagaggctgaggcctcctgtcctcagtcctcactccctagtagggctcggtagatgcaggtggtcagtgccccgggggctgtggagtgggcctggccgggccctgactgtgtgtctgtgtcccctgcagtggccggaggctgggagacccagtacatgtgctgctcggctgccgccggctctgtcggctgccaagtcgcaaaggtgagccctggcgtcccagtcccctctgcctgttctcaacagacttctgcctccccatcgttggtgtggggtctcgggacacagcacagtcctgggctcagggtctgggcccccgggcagcctttcttgtgttacccagagaacgtagcacccgtaggccccaggccctgtccctggccacttcccatcctgggaagccgtcctccctgtgtcttcttggcaagcccccttccccacctgctcaccagggtcccaaccagtgaatgggcgtgatggatggataggatggtcccgaagggctcagagatgtgctgctgctgccacccccgcccccactgcaccccgaagctgccctcacctgccttctccacccccagcaacacgtgcaggatggccggaaggagcgccttgagggcttcgtgaagacctttgagaaagagctctcaggagacacccacccggggatctacgccctggactgcgagatggtgaggctgttctctgcccagcgtcgggttcaggattggggaggacctggcctggtgcggccgccccatctggccccatctgggcctggctcaccggccagcgctcagggtttctctcgcagcaccggtgcctgtggctcctgccctggaccaacaccccatacttcccagcagagccaagcacaccgggcactgggccccggctctgcctctgaatgggaggcaggagggctttgcgaaagggggttactgaggtcacaccccactcggcctctcctagaagtcccacagagtctctggtcactgcctctgcctggaggggctctggagactcaaaggggcagggaaggggagggagggaggccggtgcctgggacacatctgaggtgcatcccttgcccgcagtcctacaccacatatggcctggagctgacgcgcgtcacggtggtcgacacggacgtgcacgtggtttatgacaccttcgtgaagcctgacaacgagatcgtggactacaacaccaggtgtggccagtgccctccacgagctgggagccctcccagccgcctctccccagggacccaccctcccccgccccaccagccagtgcttccaggctgagccctggtgcccctcctgcccgttcccccaggttttcgggggtgacggaggctgaccttgccgacacaagtgtcacgctgcgtgacgtccaggccgttctgctgagcatgttcagcgctgacaccatcctcatcggacacagcctggagagcgacctcctggccctgaaggtgccctgccggcccgggtcccgcgcggttctccagcaggacctgcgcaggccccacgtgcgctgatctctgccgctgcccacaggtcatccacagcaccgtggtggacacgtctgtgctcttcccccaccgcctgggcctcccctacaagcggtccctgcggaacctcatggccgactacctcagacagatcatccaggacaatggtgagtgccggtgcctgccctggggccgtccctgcgcaggggccgggtgctcaccgcatctgccccgcagtggatgggcacagctccagcgaggacgccggcgcctgcatgcacctggtgatctggaaggttcgagaagacgccaagaccaagcgatgacgcctgcccgcctcccacccgcctctcctgccgtcccgctggtccttagccccatgcctcttccaaaacagtgcaataaatctccggtaacccgtc

SEQ ID NO: 13683 - DNA, 1271 bp, Homo sapiens
tggcccccagcgctgtgcccggcctcagcaaaaccagtggccgcagggttgtgtcccacgaggtggtgttggggggcaggttggccgccaagaccagcttctcgctcagccgtccaagcagcccccgggtggaggacctgaaaggggctgccctgtacagccgcctcagggagtacctgctcacccaggaccagctcaaggagaacggctaccccttcccgcacccagagcggcccgggggcgcaatcatcttcacagctgaggagaagaggcccaaggactcttcctgcaggacctgctgccgctgtggcaccgagtacctcgtgtcctcttcaggccgctgcatccgggacgaggagtgttattaccactggggacggctgcgccggaaccgggtggccggaggctgggagacccagtacatgtgctgctcggctgccgccggctctgtcggctgccaagtcgcaaagggtcccaaccagtgaatgggcgtgatggatggataggatggtcccgaagggctcagagatgtgctgctgctgccacccccgcccccactgcaccccgaagctgccctcacctgccttctccacccccagcaacacgtgcaggatggccggaaggagcgccttgagggcttcgtgaagacctttgagaaagagctctcaggagacacccacccggggatctacgccctggactgcgagatgtcctacaccacatatggcctggagctgacgcgcgtcacggtggtcgacacggacgtgcacgtggtttatgacaccttcgtgaagcctgacaacgagatcgtggactacaacaccaggttttcgggggtgacggaggctgaccttgccgacacaagtgtcacgctgcgtgacgtccaggccgttctgctgagcatgttcagcgctgacaccatcctcatcggacacagcctggagagcgacctcctggccctgaaggtcatccacagcaccgtggtggacacgtctgtgctcttcccccaccgcctgggcctcccctacaagcggtccctgcggaacctcatggccgactacctcagacagatcatccaggacaatgtggatgggcacagctccagcgaggacgccggcgcctgcatgcacctggtgatctggaaggttcgagaagacgccaagaccaagcgatgacgcctgcccgcctcccacccgcctctcctgccgtcccgctggtccttagccccatgcctcttccaaaacagtgcaataaatctccggtaacccgtc

SEQ ID NO: 13684 - DNA, 6075 bp, Homo sapiens
aatgagcaggtgggggcacccgagacccttcggtcctctgtccgggagccagggcctttccctcagacatcgacgccttgggcttggggtcagaacacgtggcagaggcctggaccaccccaccggtgacgtgtcctcagcggcctccgcagcctgacctgtgtcctctgcctcgatggacttgcctgaaggcagctagagcctgatgccattgcgcagccccagcccctcaccctggcccggccccctgcacgcggagatgcacgtgctgctggcgctgagcggccgcggctgcctggtgctccgccacgtggtgatgggcagccactcgccctgtgcccacaccccctgtgccccgccagcccccacaggtgccaagaggacccttgcggccagcggcagccagtcctccaacggccctgagccaggtggccagcagctgaaaacacgcacattgtcggggatggcgtccaagactaccaccaccatcatccctaagcgaatcgcccacagtccatccttacaggtagcccctcccatctcggccaggaccaccacccccaagaccacgccctgaggcccggccacatgggacctgcggagggccagcctcgcccctgccctgcgggccttcgtgctccacaccgcagtacagccttcaccttccctccccatgccttggtgttttttttttttttttgagatggagtctcgctctgtcgcccaggctggagtgcagtggcacgatcttggctcactgcaagctctgcttcctgggttcacgccattctctggcctcagcctcctgagtagctgggactacaggcgcccgccaccacgcctggctgtttttgtatttttagtagaaacggggtttcaccatgttagccaggatggtctcgatcttctgacctcgtgatccacccgcctcggcctcccaaagtgctgggattacaggcgtgagccaccatgcccgaccgccctggcggtgtttttttgttttgtcttgttttgtttttttggttggttggtgttttttttttttgtttagagacagggtctctgttgcccaggctagagtgcaggggcgcaatcatggctcactgcaacctcgacctcctgggctcaagtgatccttccacctcagcctcctgagtagctgggaccacaagccggtgtcatcacaccccagctaataattttgttttttattttgtagagacagggttttgccacgttgtccaggctgatcttgaactcttgtcctcaagtgatcctcctgcctcagcctcccaaagtgctgggattataggcgtgagccaccacgcttggccttgttttgtttttaattaatagactttatgttttttgagcaactttaggtttctaggaaaattgagcagaaagtacagcaagttcccttgtgcccccatggcctcagtttcccatgaccttagttccgctgccctcagtttcccctgctgctcctgtcttgccttggcgtgtctgtccctactgcagccaggctgatctgtcccagcgcacctcactcttgcctccagccatgggcacggcctcatcgcgtctgcgttccccgctggaggccttgtggaggccctcacccatggcagcttttgccttccctctagagtttaaagaaacccattatccccaaagagtttgggggcaaagtccccaccgtcatccgccagcgctatctcaacctgttcatcgaggagtgtctcaagttctgtacctccaaccaggaggccatagagaaggtgaggtcctggagttcctatctggccggtcgggtggggactaggggtccagggtggtccccagacatcccccggcctctcagccgcagctgtgacccggagctgcctgggagagatgcaagtccccgaccccatggcgaccccaccgctggggctccccggcaccaggcaggcatggcctcagctgggcaccgcctgtcccccaggcactgaacgaggagaaggtggcctatgaccgcagccccagcaagaacatctacctgaatgtggccgtgaacaccctcaagaagctcaggggcctggcccccagcgctgtgcccggcctcagcagtgagtcctggcgggtgggcgggggaggctcagggttgctcttggggtggcagctgggctgggaccctcgctgggaccttcacagccctgagctcagccacagtctcagacaaaaggaaagcgcggtgctgtgggggggctgcctgctgcctggttcccaggcttctgtgtaggacggacctggccctggtgtcctcgctgtcagccgccttcctccgctgagtggggtctccaagccgagccgaggggccgcctgctaatggagctgcggcagcttcttcaaagcaggaggcccagggctgggcgagctccatgcattaagctctggggaggaagaaagcggagacctgggcgtttcattgcagcctctccaggctgcattaagctatcaccggcccctgcccccgtccccgcctgcattagcactcggaggggccctgggttggcgtcgcaggctgggtggcccatgaaggctcaaagccctcgaaagccattagatcccccgtgctgttctccccgcccttcccccttcgcttgaggggaggggacgaagactttgggtgtggggcctccgtgcagctctggggcctgcagagctggcggctgccctgcgtccctggctcaccgcatgtctgcctctcctgttcgggtcaggctggaacccggggtcagtggggtgctgtcccagaaagggggagttgaggcagaggtctgaggagggcagggtgggtgggagagcaggcggggcaggggtctgagccagctacttcacaccctcctcccctccctcccttccttccagaaaccagtggccgcagggttgtgtcccacgaggtggtgttggggggcaggttggccgccaagaccagcttctcgctcagccgtccaagcagcccccgggtggaggacctgaaaggtaaggccctgcccctgctctgccacacggtgcttcgtgggcctctgccggcccagcccctgctgtgccacacggtgcttcgtgggcccctgccggcccagccgcctttcccggtggtgtctaccgccccgtgggccatcccaggcaggggctgaccactgtgcctgtccacaggggctgccctgtacagccgcctcagggagtacctgctcacccaggaccagctcaaggagaacggctaccccttcccgcacccagagcggcccgggggcgcaatcatcttcacagctgaggagaagaggcccaaggactgtgagtcgctggcctgcgacggcctaggtgggcaggtgcgggatgtgggcaaggccgggcatgcgggccccagcgtgagcctcagcttccacctgggtccccacccacagcttcctgcaggacctgctgccgctgtggcaccgagtacctcgtgtcctcttcaggccgctgcatccgggacgaggagtgttattaccactggggacggctgcgccggaaccggggtaaggccttacccgggtccttccccttcccacccatggcccccggaacctgggccctcccttgaggcccccagaactggggtaaggctttacccaggccctccatcccactcagggtccctgggctgcaccgtctttggcagagccggggctagcccttggcctcattttctctccacctgttctttatgcaaaagtaagacaagagctttcccatgacaaggttcaaatgccaccacctgaaaggccctgtgtccctgccttcctgtgcccttggtccatggaaatgtggaggttgctggccccaggagcggaggggcttgtcccacccttggcctggtggttctattcaatcccccaggcaaccacgcagccacgctcagggcacatggccagccttgcacagccctgtggcggcccctaaagccatcgcctcagggatacctggagggtgctgcccggggcagcgctgccaagaggcctctgcagagggcactggtctccctggatccaggcctgggcgtcctggctgccacacgactgccggggcctggtctgcttccagctccaccaagaggctgaggcctcctgtcctcagtcctcactccctagtagggctcggtagatgcaggtggtcagtgccccgggggctgtggagtgggcctggccgggccctgactgtgtgtctgtgtcccctgcagtggccggaggctgggagacccagtacatgtgctgctcggctgccgccggctctgtcggctgccaagtcgcaaaggtgagccctggcgtcccagtcccctctgcctgttctcaacagacttctgcctccccatcgttggtgtggggtctcgggacacagcacagtcctgggctcagggtctgggcccccgggcagcctttcttgtgttacccagagaacgtagcacccgtaggccccaggccctgtccctggccacttcccatcctgggaagccgtcctccctgtgtcttcttggcaagcccccttccccacctgctcaccagggtcccaaccagtgaatgggcgtgatggatggataggatggtcccgaagggctcagagatgtgctgctgctgccacccccgcccccactgcaccccgaagctgccctcacctgccttctccacccccagcaacacgtgcaggatggccggaaggagcgccttgagggcttcgtgaagacctttgagaaagagctctcaggagacacccacccggggatctacgccctggactgcgagatggtgaggctgttctctgcccagcgtcgggttcaggattggggaggacctggcctggtgcggccgccccatctggccccatctgggcctggctcaccggccagcgctcagggtttctctcgcagcaccggtgcctgtggctcctgccctggaccaacaccccatacttcccagcagagccaagcacaccgggcactgggccccggctctgcctctgaatgggaggcaggagggctttgcgaaagggggttactgaggtcacaccccactcggcctctcctagaagtcccacagagtctctggtcactgcctctgcctggaggggctctggagactcaaaggggcagggaaggggagggagggaggccggtgcctgggacacatctgaggtgcatcccttgcccgcagtcctacaccacatatggcctggagctgacgcgcgtcacggtggtcgacacggacgtgcacgtggtttatgacaccttcgtgaagcctgacaacgagatcgtggactacaacaccaggtgtggccagtgccctccacgagctgggagccctcccagccgcctctccccagggacccaccctcccccgccccaccagccagtgcttccaggctgagccctggtgcccctcctgcccgttcccccaggttttcgggggtgacggaggctgaccttgccgacacaagtgtcacgctgcgtgacgtccaggccgttctgctgagcatgttcagcgctgacaccatcctcatcggacacagcctggagagcgacctcctggccctgaaggtgccctgccggcccgggtcccgcgcggttctccagcaggacctgcgcaggccccacgtgcgctgatctctgccgctgcccacaggtcatccacagcaccgtggtggacacgtctgtgctcttcccccaccgcctgggcctcccctacaagcggtccctgcggaacctcatggccgactacctcagacagatcatccaggacaatggtgagtgccggtgcctgccctggggccgtccctgcgcaggggccgggtgctcaccgcatctgccccgcagtggatgggcacagctccagcgaggacgccggcgcctgcatgcacctggtgatctggaaggttcgagaagacgccaagaccaagcgatgacgcctgcccgcctcccacccgcctctcctgccgtcccgctggtccttagccccatgcctcttccaaaacagtgcaataaatctccggtaacccgtc

SEQ ID NO: 13685 - DNA, 1894 bp, Homo sapiens
aatgagcaggtgggggcacccgagacccttcggtcctctgtccgggagccagggcctttccctcagacatcgacgccttgggcttggggtcagaacacgtggcagaggcctggaccaccccaccggtgacgtgtcctcagcggcctccgcagcctgacctgtgtcctctgcctcgatggacttgcctgaaggcagctagagcctgatgccattgcgcagccccagcccctcaccctggcccggccccctgcacgcggagatgcacgtgctgctggcgctgagcggccgcggctgcctggtgctccgccacgtggtgatgggcagccactcgccctgtgcccacaccccctgtgccccgccagcccccacaggtgccaagaggacccttgcggccagcggcagccagtcctccaacggccctgagccaggtggccagcagctgaaaacacgcacattgtcggggatggcgtccaagactaccaccaccatcatccctaagcgaatcgcccacagtccatccttacagagtttaaagaaacccattatccccaaagagtttgggggcaaagtccccaccgtcatccgccagcgctatctcaacctgttcatcgaggagtgtctcaagttctgtacctccaaccaggaggccatagagaaggcactgaacgaggagaaggtggcctatgaccgcagccccagcaagaacatctacctgaatgtggccgtgaacaccctcaagaagctcaggggcctggcccccagcgctgtgcccggcctcagcaaaaccagtggccgcagggttgtgtcccacgaggtggtgttggggggcaggttggccgccaagaccagcttctcgctcagccgtccaagcagcccccgggtggaggacctgaaaggggctgccctgtacagccgcctcagggagtacctgctcacccaggaccagctcaaggagaacggctaccccttcccgcacccagagcggcccgggggcgcaatcatcttcacagctgaggagaagaggcccaaggactcttcctgcaggacctgctgccgctgtggcaccgagtacctcgtgtcctcttcaggccgctgcatccgggacgaggagtgttattaccactggggacggctgcgccggaaccgggtggccggaggctgggagacccagtacatgtgctgctcggctgccgccggctctgtcggctgccaagtcgcaaagcaacacgtgcaggatggccggaaggagcgccttgagggcttcgtgaagacctttgagaaagagctctcaggagacacccacccggggatctacgccctggactgcgagatgtcctacaccacatatggcctggagctgacgcgcgtcacggtggtcgacacggacgtgcacgtggtttatgacaccttcgtgaagcctgacaacgagatcgtggactacaacaccaggttttcgggggtgacggaggctgaccttgccgacacaagtgtcacgctgcgtgacgtccaggccgttctgctgagcatgttcagcgctgacaccatcctcatcggacacagcctggagagcgacctcctggccctgaaggtcatccacagcaccgtggtggacacgtctgtgctcttcccccaccgcctgggcctcccctacaagcggtccctgcggaacctcatggccgactacctcagacagatcatccaggacaatgtggatgggcacagctccagcgaggacgccggcgcctgcatgcacctggtgatctggaaggttcgagaagacgccaagaccaagcgatgacgcctgcccgcctcccacccgcctctcctgccgtcccgctggtccttagccccatgcctcttccaaaacagtgcaataaatctccggtaacccgtc

SEQ ID NO: 13686 - DNA, 6612 bp, Homo sapiens
ccaggaccttggggctgggctggagtgaaggtggctacgaggtagtttctctttctcccttacctttattgttgcttgtgttggaaggcgactgttcagaggtagggaggggcaagatgagttgggaggagagcagaaaaagattgtagctgtattttcaacagcttcttcacccatgtgcacgtgcccggaatctgggaccccattcccctgccgggtttctgacgcccagcgcatgagttccgctaccccgccccacccccgctccactttgcagaaaccggggattgaatggagggggaagggaaggaggtgggggcgcgcctcaggatgggctgttgtgggagatgacgtaggggccggcgacgtggggagggggagcagcgggggaagtcgtggcgagattaagtaatgagaacttgggcccagttttttttccaagcctagaagggcagaatatgttcgtatcctttctgacctcccaggcatatgcaatggtgaggagtatttttgagaattagagaactttgttttgtggctgttattgttgtttttgagggggaggagggcagtatggggtcagaggcagaaatgaaaatttcttgctaacatggattcccaatccccctatctcttcctttacagttttccagatttaggagacttcagaaaggtggggcagatagaatggagatggcaaagatctctttgggcatatatgggcctggcgaagtaatggaataatttctaattttcggagaaggcaagtggtgagaaaaagaccaccggggaaattcggaggctttgtttctgtttctctgcctttctgggtaaagagatgaggagtgccctggggccttctggggaagggaaggccagtgtgagttacatctttatgcctgtccctctcaattctagccctcatgccgggatggcagaagatgagcctgatgctaagagccccaagactgggggaagggcccccccaggtggtgctgaggctggggaacctaccacccttcttcagaggctccgaggtaccatttcgtaagtactcatcacatctccaagtcctgtccaagacctgagtatagatccctgcagcacttcactttggctgtagatgaactgcctctcagcaagggcatgggagcagagggagatttttggccatggtagcaattcttgagcacctgctgggcatttcagtccttttccctccctagcagtcagataaagagacagggaaaatcttgtgtgtgacctccagctttctcctcttccccacagcaaggccgtgcagaacaaagtagaggggatcctggtaagtgtgttggggaagagggcaagagagggatggaaatgctgagggaggaggatgtgaggatgatgggcatcaacaaaacattgatgtgggagaggtagggtcctctgccttgtcagaagatagttggctttgcaaacttgctgccagtttgactttgtgcctctcacttgatctctgtgagcacttgcatagaagcccagcagagatgaagtcagagctgatcccctctacttccctcctctccatggtagcctatagggctcctcagagcacctagcatcaaataatttctttcttttttttttttttttttgagatggagtctcactctgtcgcctaggctggagtgcagtggcgcaatctcggctcactgcaagctccgcctcccaggttcacgccattctcctgcctcagcctcccaagtagctgggactacaggcgcccgtcaccacacccagctaatttttttttgtatttttagtagaaacggggtttcaccatgttagccaggatggtctcgatctcctgaccttgtgatcagcctgccttggccttccaaagtgctgggattgtaggcgtgagccaccgtgcccggccttgtcaaataatttctaaggtcctttttcagtctgacaccctgtaagtcagctagactttggtgtggggatcagagggtcctatattgggtccttcttggccttattatttctcctgcctctgttctctcctacctcagcaagatgtacagaaattttctgacaatgacaagctgtatctctaccttcagctcccctcaggacccaccactggagacaaaaggtaggtttgatagtagttttagatggcagaggttctgattcttagagaaaggttcactgggaaggggtgaggtgaataggaatactcgtaaatgctgtccttgatgaagaggaaaggtcctcgccctgacttggtttaccagggaaagttagattctgggtgaactaaatttggtccagcactactgaagtggtagtttgggaagaaccaggacaactgttagggtcttagtaatgcttgttccttttgtttctgtagctcagagccaagtacactgagcaatgaggagtacatgtatgcctataggtggatccgcaaccacctggaagagcacactgacacctgtctgccaaagcaaagtgtttatgatgcctatcggtgggtggaggggtgggtggtgggatgagtggattggtgggcataggaccccctcacccatgaagagcttcctgccttgataaagcctgccttcttaaagggttcctcacacttgatccctagggactcttcgagcctacccatggcctccttctctgagtatcttcccactctgctcccctctcactcaggaagtactgtgagagtcttgcctgttgccgcccactcagcacagccaactttggcaagatcatcagagagatcttccctgacatcaaagctcgaaggcttggtggccggggccagtccaagtatccttgactagagaggttgggggtggaggacctgggaggaagacttaggatgtggagagcaaggagtggaacagcttaacttgctcgaggggcttggagatcgccatgtgttggctgctctttaacttgcatcagatattgctacagtggcataaggaggaagaccttggtgtctatgccacccctgcctggacttgacctaaagggttctgagagtgtaagtaccaaatcaccttccaattccactcttctctcccaggtaaaagtcagaggtctttggggcatgttttgagggctaacagcctcagtcattatgtacatagcttctaggtatgatgttcccttctgccaaccctgtagctgaggcagaggatgaagagaacttgtgggcttctgcaatgggataggtagaggctactcccatccccagtctggtctcagctttggtcaatagtctttgatctctgacaagagaggaggcaagggttctttaatttggagtgtgattgggcatgtccttccccacttcagccagaaatgggcccagaagtaaccccagcacctcgagatgaactggtggaggcagcgtgtgccctgacctgtgactgggcagagcggatcctgaaacggtccttcagttccatcgttgaggtcgcccgcttcctgctacagcagcatctcatctctgcccgatctgcacatgcccatgtgcttaaggccatggggctcgctggtgtgttgaccctctcttatgtctcagcaaccctgagccactttcagcttcagtggccctcccacacactagaatagagacaccttggatttgccccctcttcctggagacccttctaagacatgctttagcaccccatttcctgtctctaccagtcagtcaatcagaattgcctcactcccctattcctcagtttcctcctcaccttcactctattacctttttggtacctctgcagaagaggacgaacatgcacctcgggaacggtcatctaaaccaaagaatggtttagagaacccagagggtggagcccacaagaagccagagagactggcccaggtaaggaagtcagtggccctgactttgctgtcctgggctgggggcttagtatatccttctccaattgggtcccttgcttttccacctcctgtgcctctggcgtctatgtttcccccaatactcattcttcacaccttactgtgttcctctctttactttttagcctcctaaggatctggaagcccgaactggggccggtcctctcgcacgtggagagcggaagaagagtgtagttgagagctcggccccaggagccaataacctgcaggttaatgccctagtggctcggctgcctctgctccttccccgggcccctcgctcactaattccgccaatcccagtctctccacctattctggcccccaggctttcttcaggtgccctgaaagtggctacactgcctctgtctagtagggccggggcacccccagcagctgtgcccatcattaacatgatcttaccaactgttcctgctttgcctggacctggacctgggcctgggcgagctccacctgggggactcactcagccccggggcacagagaacagagaggtaggcataggtggtgaccaaggaccacatgacaagggtgtcaagaggacagctgaagtacctgtgagtgaggccagtgggcaggctccaccagctaaagcagcaaagcaggatatagaggatacagcaagtgatgccaaaaggaaacgggggcgccctcgaaaaaagtcaggtggaagtggggaaaggaattctacccctctcaagtcagcagctgccatggaatctgcccagtcctcaaggttaccatgggagacatggggctcaggaggggaaggcaactcagctggaggggcagagaggccagggccaatgggagaggctgaaaagggggcagtacttgcccagggtcagggagatggtactgtttccaaaggaggaaggggccccggttcccagcataccaaagaagcagaagataaaattcccttggtcccctcaaaagtgagtgtcatcaagggcagcagaagccaaaaggaggcttttcctttggcaaagggagaggtagacactgcaccacagggtaataaagacttaaaggagcatgtgcttcaaagttccttatcccaggagcataaagacccaaaagcaacacccccatgatacaggtctgtggggaagagtgtttatatccctacgttaactttgcctagtagaggcccttctttgcacttgcttctcatttggctattcttttcctaaggaagtccattctcctctgtacagacagctgagtcacccagtctacttagtacctggttgctgcctctgaccttttcagcttgataccctgggctttagtgtaaccaataaatctgtagtgaccttacctgtattccctgtgctatcctgtgggaaggtaggaatgggctaagtatgatgaatatataggttagggatcttttggttttaaatcacagaaaacctaattcaaactggcttaaaataaaaaggatttattggttcatgtaactagaaagtccataggtagtgctggctccaggtgaagacttgacccagtagttcagtatgtctctaaataccggactgacttttttctcactgttgcatcttctgtaggaccatttaagtctgggccacttaatggctgccagcattcctaagattacacttttccccatttatgtccaatcagaaaaagaaggcatctttgtaccagaaatctcagcaaaagccctaatattcacactgattaggcctgggtcacatgtccaccctgaccaatcactgtggccaggaggatgatacatgctaatttgcttattctatatcatggacaacacctttggggaaaagggtgggggtcagcctccccaaaatcacatggattccccaagtggaaactaggagcagggagttgcttgggtggccgctaacaccaggctactcttattttagcttgctaagttgagatcagctagacctgctttcttttctcctcagtcttgcatttccctcaatacaagctgtagcctctttcctcgtttctagtctcagaaggaaggagagggaagccattctcctctagggactcttcagtctcatttagatgatagtccctttttttctacctccatattagagatggagctccttccttttcctgtttcttaatttttgtcttctcattcctgcttccctctcaccctattgccagttccaccaactagagtgaaagacttcctagccatttcattaaatctattctgtatccaccaggtggcagcatcttgtcatacgtgtcaggacttaggactgcggggtttaggttagatgtcacggaaaaagctagttctgtggtcaggcggcaccaatgagaaaggaatgcagaccctccagatgtatccttgggaaaagcagtaaaccaactaatatttattgaagacctactttgtcctctacatagggtagcttctgtcagggaatcttggttcttcccaagaaacactgattttctttcagggagacttcatgtgttcatttatttccaccacagcagattttaagaaattataatatgtaatatttgatatctataaagagtatatctaacgtgaataaattatgaagcatactaatgagtacctatgacccataacacatatacattaaaacattttaaatacca

SEQ ID NO: 13687 - DNA, 3576 bp, Homo sapiens
ccaggaccttggggctgggctggagtgaaggtggctacgagttttccagatttaggagacttcagaaaggtggggcagatagaatggagatggcaaagatctctttgggcatatatgggcctggcgaagtaatggaataatttctaattttcggagaaggcaagtgccctcatgccgggatggcagaagatgagcctgatgctaagagccccaagactgggggaagggcccccccaggtggtgctgaggctggggaacctaccacccttcttcagaggctccgaggtaccatttccaaggccgtgcagaacaaagtagaggggatcctgcaagatgtacagaaattttctgacaatgacaagctgtatctctaccttcagctcccctcaggacccaccactggagacaaaagctcagagccaagtacactgagcaatgaggagtacatgtatgcctataggtggatccgcaaccacctggaagagcacactgacacctgtctgccaaagcaaagtgtttatgatgcctatcggaagtactgtgagagtcttgcctgttgccgcccactcagcacagccaactttggcaagatcatcagagagatcttccctgacatcaaagctcgaaggcttggtggccggggccagtccaaatattgctacagtggcataaggaggaagaccttggtgtctatgccacccctgcctggacttgacctaaagggttctgagagtccagaaatgggcccagaagtaaccccagcacctcgagatgaactggtggaggcagcgtgtgccctgacctgtgactgggcagagcggatcctgaaacggtccttcagttccatcgttgaggtcgcccgcttcctgctacagcagcatctcatctctgcccgatctgcacatgcccatgtgcttaaggccatggggctcgctgaagaggacgaacatgcacctcgggaacggtcatctaaaccaaagaatggtttagagaacccagagggtggagcccacaagaagccagagagactggcccagcctcctaaggatctggaagcccgaactggggccggtcctctcgcacgtggagagcggaagaagagtgtagttgagagctcggccccaggagccaataacctgcaggttaatgccctagtggctcggctgcctctgctccttccccgggcccctcgctcactaattccgccaatcccagtctctccacctattctggcccccaggctttcttcaggtgccctgaaagtggctacactgcctctgtctagtagggccggggcacccccagcagctgtgcccatcattaacatgatcttaccaactgttcctgctttgcctggacctggacctgggcctgggcgagctccacctgggggactcactcagccccggggcacagagaacagagaggtaggcataggtggtgaccaaggaccacatgacaagggtgtcaagaggacagctgaagtacctgtgagtgaggccagtgggcaggctccaccagctaaagcagcaaagcaggatatagaggatacagcaagtgatgccaaaaggaaacgggggcgccctcgaaaaaagtcaggtggaagtggggaaaggaattctacccctctcaagtcagcagctgccatggaatctgcccagtcctcaaggttaccatgggagacatggggctcaggaggggaaggcaactcagctggaggggcagagaggccagggccaatgggagaggctgaaaagggggcagtacttgcccagggtcagggagatggtactgtttccaaaggaggaaggggccccggttcccagcataccaaagaagcagaagataaaattcccttggtcccctcaaaagtgagtgtcatcaagggcagcagaagccaaaaggaggcttttcctttggcaaagggagaggtagacactgcaccacagggtaataaagacttaaaggagcatgtgcttcaaagttccttatcccaggagcataaagacccaaaagcaacacccccatgatacaggtctgtggggaagagtgtttatatccctacgttaactttgcctagtagaggcccttctttgcacttgcttctcatttggctattcttttcctaaggaagtccattctcctctgtacagacagctgagtcacccagtctacttagtacctggttgctgcctctgaccttttcagcttgataccctgggctttagtgtaaccaataaatctgtagtgaccttacctgtattccctgtgctatcctgtgggaaggtaggaatgggctaagtatgatgaatatataggttagggatcttttggttttaaatcacagaaaacctaattcaaactggcttaaaataaaaaggatttattggttcatgtaactagaaagtccataggtagtgctggctccaggtgaagacttgacccagtagttcagtatgtctctaaataccggactgacttttttctcactgttgcatcttctgtaggaccatttaagtctgggccacttaatggctgccagcattcctaagattacacttttccccatttatgtccaatcagaaaaagaaggcatctttgtaccagaaatctcagcaaaagccctaatattcacactgattaggcctgggtcacatgtccaccctgaccaatcactgtggccaggaggatgatacatgctaatttgcttattctatatcatggacaacacctttggggaaaagggtgggggtcagcctccccaaaatcacatggattccccaagtggaaactaggagcagggagttgcttgggtggccgctaacaccaggctactcttattttagcttgctaagttgagatcagctagacctgctttcttttctcctcagtcttgcatttccctcaatacaagctgtagcctctttcctcgtttctagtctcagaaggaaggagagggaagccattctcctctagggactcttcagtctcatttagatgatagtccctttttttctacctccatattagagatggagctccttccttttcctgtttcttaatttttgtcttctcattcctgcttccctctcaccctattgccagttccaccaactagagtgaaagacttcctagccatttcattaaatctattctgtatccaccaggtggcagcatcttgtcatacgtgtcaggacttaggactgcggggtttaggttagatgtcacggaaaaagctagttctgtggtcaggcggcaccaatgagaaaggaatgcagaccctccagatgtatccttgggaaaagcagtaaaccaactaatatttattgaagacctactttgtcctctacatagggtagcttctgtcagggaatcttggttcttcccaagaaacactgattttctttcagggagacttcatgtgttcatttatttccaccacagcagattttaagaaattataatatgtaatatttgatatctataaagagtatatctaacgtgaataaattatgaagcatactaatgagtacctatgacccataacacatatacattaaaacattttaaatacca

SEQ ID NO: 13688 - DNA, 5498 bp, Homo sapiens
cgtgtatctaggcagatcgcggctgttacaaccattcagaaaaaggaaaataaagcaacgcacgagccggctgggccaggaccttggggctgggctggagtgaaggtggctacgaggtagtttctctttctcccttacctttattgttgcttgtgttggaaggcgactgttcagaggtagggaggggcaagatgagttgggaggagagcagaaaaagattgtagctgtattttcaacagcttcttcacccatgtgcacgtgcccggaatctgggaccccattcccctgccgggtttctgacgcccagcgcatgagttccgctaccccgccccacccccgctccactttgcagaaaccggggattgaatggagggggaagggaaggaggtgggggcgcgcctcaggatgggctgttgtgggagatgacgtaggggccggcgacgtggggagggggagcagcgggggaagtcgtggcgagattaagtaatgagaacttgggcccagttttttttccaagcctagaagggcagaatatgttcgtatcctttctgacctcccaggcatatgcaatggtgaggagtatttttgagaattagagaactttgttttgtggctgttattgttgtttttgagggggaggagggcagtatggggtcagaggcagaaatgaaaatttcttgctaacatggattcccaatccccctatctcttcctttacagttttccagatttaggagacttcagaaaggtggggcagatagaatggagatggcaaagatctctttgggcatatatgggcctggcgaagtaatggaataatttctaattttcggagaaggcaagtggtgagaaaaagaccaccggggaaattcggaggctttgtttctgtttctctgcctttctgggtaaagagatgaggagtgccctggggccttctggggaagggaaggccagtgtgagttacatctttatgcctgtccctctcaattctagccctcatgccgggatggcagaagatgagcctgatgctaagagccccaagactgggggaagggcccccccaggtggtgctgaggctggggaacctaccacccttcttcagaggctccgaggtaccatttcgtaagtactcatcacatctccaagtcctgtccaagacctgagtatagatccctgcagcacttcactttggctgtagatgaactgcctctcagcaagggcatgggagcagagggagatttttggccatggtagcaattcttgagcacctgctgggcatttcagtccttttccctccctagcagtcagataaagagacagggaaaatcttgtgtgtgacctccagctttctcctcttccccacagcaaggccgtgcagaacaaagtagaggggatcctggtaagtgtgttggggaagagggcaagagagggatggaaatgctgagggaggaggatgtgaggatgatgggcatcaacaaaacattgatgtgggagaggtagggtcctctgccttgtcagaagatagttggctttgcaaacttgctgccagtttgactttgtgcctctcacttgatctctgtgagcacttgcatagaagcccagcagagatgaagtcagagctgatcccctctacttccctcctctccatggtagcctatagggctcctcagagcacctagcatcaaataatttctttcttttttttttttttttttgagatggagtctcactctgtcgcctaggctggagtgcagtggcgcaatctcggctcactgcaagctccgcctcccaggttcacgccattctcctgcctcagcctcccaagtagctgggactacaggcgcccgtcaccacacccagctaatttttttttgtatttttagtagaaacggggtttcaccatgttagccaggatggtctcgatctcctgaccttgtgatcagcctgccttggccttccaaagtgctgggattgtaggcgtgagccaccgtgcccggccttgtcaaataatttctaaggtcctttttcagtctgacaccctgtaagtcagctagactttggtgtggggatcagagggtcctatattgggtccttcttggccttattatttctcctgcctctgttctctcctacctcagcaagatgtacagaaattttctgacaatgacaagctgtatctctaccttcagctcccctcaggacccaccactggagacaaaaggtaggtttgatagtagttttagatggcagaggttctgattcttagagaaaggttcactgggaaggggtgaggtgaataggaatactcgtaaatgctgtccttgatgaagaggaaaggtcctcgccctgacttggtttaccagggaaagttagattctgggtgaactaaatttggtccagcactactgaagtggtagtttgggaagaaccaggacaactgttagggtcttagtaatgcttgttccttttgtttctgtagctcagagccaagtacactgagcaatgaggagtacatgtatgcctataggtggatccgcaaccacctggaagagcacactgacacctgtctgccaaagcaaagtgtttatgatgcctatcggtgggtggaggggtgggtggtgggatgagtggattggtgggcataggaccccctcacccatgaagagcttcctgccttgataaagcctgccttcttaaagggttcctcacacttgatccctagggactcttcgagcctacccatggcctccttctctgagtatcttcccactctgctcccctctcactcaggaagtactgtgagagtcttgcctgttgccgcccactcagcacagccaactttggcaagatcatcagagagatcttccctgacatcaaagctcgaaggcttggtggccggggccagtccaagtatccttgactagagaggttgggggtggaggacctgggaggaagacttaggatgtggagagcaaggagtggaacagcttaacttgctcgaggggcttggagatcgccatgtgttggctgctctttaacttgcatcagatattgctacagtggcataaggaggaagaccttggtgtctatgccacccctgcctggacttgacctaaagggttctgagagtgtaagtaccaaatcaccttccaattccactcttctctcccaggtaaaagtcagaggtctttggggcatgttttgagggctaacagcctcagtcattatgtacatagcttctaggtatgatgttcccttctgccaaccctgtagctgaggcagaggatgaagagaacttgtgggcttctgcaatgggataggtagaggctactcccatccccagtctggtctcagctttggtcaatagtctttgatctctgacaagagaggaggcaagggttctttaatttggagtgtgattgggcatgtccttccccacttcagccagaaatgggcccagaagtaaccccagcacctcgagatgaactggtggaggcagcgtgtgccctgacctgtgactgggcagagcggatcctgaaacggtccttcagttccatcgttgaggtcgcccgcttcctgctacagcagcatctcatctctgcccgatctgcacatgcccatgtgcttaaggccatggggctcgctggtgtgttgaccctctcttatgtctcagcaaccctgagccactttcagcttcagtggccctcccacacactagaatagagacaccttggatttgccccctcttcctggagacccttctaagacatgctttagcaccccatttcctgtctctaccagtcagtcaatcagaattgcctcactcccctattcctcagtttcctcctcaccttcactctattacctttttggtacctctgcagaagaggacgaacatgcacctcgggaacggtcatctaaaccaaagaatggtttagagaacccagagggtggagcccacaagaagccagagagactggcccaggtaaggaagtcagtggccctgactttgctgtcctgggctgggggcttagtatatccttctccaattgggtcccttgcttttccacctcctgtgcctctggcgtctatgtttcccccaatactcattcttcacaccttactgtgttcctctctttactttttagcctcctaaggatctggaagcccgaactggggccggtcctctcgcacgtggagagcggaagaagagtgtagttgagagctcggccccaggagccaataacctgcaggttaatgccctagtggctcggctgcctctgctccttccccgggcccctcgctcactaattccgccaatcccagtctctccacctattctggcccccaggctttcttcaggtgccctgaaagtggctacactgcctctgtctagtagggccggggcacccccagcagctgtgcccatcattaacatgatcttaccaactgttcctgctttgcctggacctggacctgggcctgggcgagctccacctgggggactcactcagccccggggcacagagaacagagaggtaggcataggtggtgaccaaggaccacatgacaagggtgtcaagaggacagctgaagtacctgtgagtgaggccagtgggcaggctccaccagctaaagcagcaaagcaggatatagaggatacagcaagtgatgccaaaaggaaacgggggcgccctcgaaaaaagtcaggtggaagtggggaaaggaattctacccctctcaagtcagcagctgccatggaatctgcccagtcctcaaggttaccatgggagacatggggctcaggaggggaaggcaactcagctggaggggcagagaggccagggccaatgggagaggctgaaaagggggcagtacttgcccagggtcagggagatggtactgtttccaaaggaggaaggggccccggttcccagcataccaaagaagcagaagataaaattcccttggtcccctcaaaagtgagtgtcatcaagggcagcagaagccaaaaggaggcttttcctttggcaaagggagaggtagacactgcaccacagggtaataaagacttaaaggagcatgtgcttcaaagttccttatcccaggagcataaagacccaaaagcaacacccccatgatacaggtctgtggggaagagtgtttatatccctacgttaactttgcctagtagaggcccttctttgcacttgcttctcatttggctattcttttcctaaggaagtccattctcctctgtacagacagctgagtcacccagtctacttagtacctggttgctgcctctgaccttttcagcttgataccctgggctttagtgtaaccaataaatctgtagtgaccttacctgtattccctgtgctatcctgtgggaaggtaggaatgggctaagtatgatgaatatataggttagggatcttttggttttaaatcacagaaaacctaattcaaactggcttaaaataaaaaggatttat

SEQ ID NO: 13689 - DNA, 2459 bp, Homo sapiens
cgtgtatctaggcagatcgcggctgttacaaccattcagaaaaaggaaaataaagcaacgcacgagccggctgggccaggaccttggggctgggctggagtgaaggtggctacgagttttccagatttaggagacttcagaaaggtggggcagatagaatggagatggcaaagatctctttgggcatatatgggcctggcgaagtaatggaataatttctaattttcggagaaggcaaccctcatgccgggatggcagaagatgagcctgatgctaagagccccaagactgggggaagggcccccccaggtggtgctgaggctggggaacctaccacccttcttcagaggctccgaggtaccatttccaaggccgtgcagaacaaagtagaggggatcctgcaagatgtacagaaattttctgacaatgacaagctgtatctctaccttcagctcccctcaggacccaccactggagacaaaagctcagagccaagtacactgagcaatgaggagtacatgtatgcctataggtggatccgcaaccacctggaagagcacactgacacctgtctgccaaagcaaagtgtttatgatgcctatcggaagtactgtgagagtcttgcctgttgccgcccactcagcacagccaactttggcaagatcatcagagagatcttccctgacatcaaagctcgaaggcttggtggccggggccagtccaaatattgctacagtggcataaggaggaagaccttggtgtctatgccacccctgcctggacttgacctaaagggttctgagagtccagaaatgggcccagaagtaaccccagcacctcgagatgaactggtggaggcagcgtgtgccctgacctgtgactgggcagagcggatcctgaaacggtccttcagttccatcgttgaggtcgcccgcttcctgctacagcagcatctcatctctgcccgatctgcacatgcccatgtgcttaaggccatggggctcgctgaagaggacgaacatgcacctcgggaacggtcatctaaaccaaagaatggtttagagaacccagagggtggagcccacaagaagccagagagactggcccagcctcctaaggatctggaagcccgaactggggccggtcctctcgcacgtggagagcggaagaagagtgtagttgagagctcggccccaggagccaataacctgcaggttaatgccctagtggctcggctgcctctgctccttccccgggcccctcgctcactaattccgccaatcccagtctctccacctattctggcccccaggctttcttcaggtgccctgaaagtggctacactgcctctgtctagtagggccggggcacccccagcagctgtgcccatcattaacatgatcttaccaactgttcctgctttgcctggacctggacctgggcctgggcgagctccacctgggggactcactcagccccggggcacagagaacagagaggtaggcataggtggtgaccaaggaccacatgacaagggtgtcaagaggacagctgaagtacctgtgagtgaggccagtgggcaggctccaccagctaaagcagcaaagcaggatatagaggatacagcaagtgatgccaaaaggaaacgggggcgccctcgaaaaaagtcaggtggaagtggggaaaggaattctacccctctcaagtcagcagctgccatggaatctgcccagtcctcaaggttaccatgggagacatggggctcaggaggggaaggcaactcagctggaggggcagagaggccagggccaatgggagaggctgaaaagggggcagtacttgcccagggtcagggagatggtactgtttccaaaggaggaaggggccccggttcccagcataccaaagaagcagaagataaaattcccttggtcccctcaaaagtgagtgtcatcaagggcagcagaagccaaaaggaggcttttcctttggcaaagggagaggtagacactgcaccacagggtaataaagacttaaaggagcatgtgcttcaaagttccttatcccaggagcataaagacccaaaagcaacacccccatgatacaggtctgtggggaagagtgtttatatccctacgttaactttgcctagtagaggcccttctttgcacttgcttctcatttggctattcttttcctaaggaagtccattctcctctgtacagacagctgagtcacccagtctacttagtacctggttgctgcctctgaccttttcagcttgataccctgggctttagtgtaaccaataaatctgtagtgaccttacctgtattccctgtgctatcctgtgggaaggtaggaatgggctaagtatgatgaatatataggttagggatcttttggttttaaatcacagaaaacctaattcaaactggcttaaaataaaaaggatttat

SEQ ID NO: 13690 - DNA, 4576 bp, Homo sapiens
ttttttttccaagcctagaagggcagaatatgttcgtatcctttctgacctcccaggcatatgcaatggtgaggagtatttttgagaattagagaactttgttttgtggctgttattgttgtttttgagggggaggagggcagtatggggtcagaggcagaaatgaaaatttcttgctaacatggattcccaatccccctatctcttcctttacagttttccagatttaggagacttcagaaaggtggggcagatagaatggagatggcaaagatctctttgggcatatatgggcctggcgaagtaatggaataatttctaattttcggagaaggcaagtggtgagaaaaagaccaccggggaaattcggaggctttgtttctgtttctctgcctttctgggtaaagagatgaggagtgccctggggccttctggggaagggaaggccagtgtgagttacatctttatgcctgtccctctcaattctagccctcatgccgggatggcagaagatgagcctgatgctaagagccccaagactgggggaagggcccccccaggtggtgctgaggctggggaacctaccacccttcttcagaggctccgaggtaccatttcgtaagtactcatcacatctccaagtcctgtccaagacctgagtatagatccctgcagcacttcactttggctgtagatgaactgcctctcagcaagggcatgggagcagagggagatttttggccatggtagcaattcttgagcacctgctgggcatttcagtccttttccctccctagcagtcagataaagagacagggaaaatcttgtgtgtgacctccagctttctcctcttccccacagcaaggccgtgcagaacaaagtagaggggatcctggtaagtgtgttggggaagagggcaagagagggatggaaatgctgagggaggaggatgtgaggatgatgggcatcaacaaaacattgatgtgggagaggtagggtcctctgccttgtcagaagatagttggctttgcaaacttgctgccagtttgactttgtgcctctcacttgatctctgtgagcacttgcatagaagcccagcagagatgaagtcagagctgatcccctctacttccctcctctccatggtagcctatagggctcctcagagcacctagcatcaaataatttctttcttttttttttttttttttgagatggagtctcactctgtcgcctaggctggagtgcagtggcgcaatctcggctcactgcaagctccgcctcccaggttcacgccattctcctgcctcagcctcccaagtagctgggactacaggcgcccgtcaccacacccagctaatttttttttgtatttttagtagaaacggggtttcaccatgttagccaggatggtctcgatctcctgaccttgtgatcagcctgccttggccttccaaagtgctgggattgtaggcgtgagccaccgtgcccggccttgtcaaataatttctaaggtcctttttcagtctgacaccctgtaagtcagctagactttggtgtggggatcagagggtcctatattgggtccttcttggccttattatttctcctgcctctgttctctcctacctcagcaagatgtacagaaattttctgacaatgacaagctgtatctctaccttcagctcccctcaggacccaccactggagacaaaaggtaggtttgatagtagttttagatggcagaggttctgattcttagagaaaggttcactgggaaggggtgaggtgaataggaatactcgtaaatgctgtccttgatgaagaggaaaggtcctcgccctgacttggtttaccagggaaagttagattctgggtgaactaaatttggtccagcactactgaagtggtagtttgggaagaaccaggacaactgttagggtcttagtaatgcttgttccttttgtttctgtagctcagagccaagtacactgagcaatgaggagtacatgtatgcctataggtggatccgcaaccacctggaagagcacactgacacctgtctgccaaagcaaagtgtttatgatgcctatcggtgggtggaggggtgggtggtgggatgagtggattggtgggcataggaccccctcacccatgaagagcttcctgccttgataaagcctgccttcttaaagggttcctcacacttgatccctagggactcttcgagcctacccatggcctccttctctgagtatcttcccactctgctcccctctcactcaggaagtactgtgagagtcttgcctgttgccgcccactcagcacagccaactttggcaagatcatcagagagatcttccctgacatcaaagctcgaaggcttggtggccggggccagtccaagtatccttgactagagaggttgggggtggaggacctgggaggaagacttaggatgtggagagcaaggagtggaacagcttaacttgctcgaggggcttggagatcgccatgtgttggctgctctttaacttgcatcagatattgctacagtggcataaggaggaagaccttggtgtctatgccacccctgcctggacttgacctaaagggttctgagagtgtaagtaccaaatcaccttccaattccactcttctctcccaggtaaaagtcagaggtctttggggcatgttttgagggctaacagcctcagtcattatgtacatagcttctaggtatgatgttcccttctgccaaccctgtagctgaggcagaggatgaagagaacttgtgggcttctgcaatgggataggtagaggctactcccatccccagtctggtctcagctttggtcaatagtctttgatctctgacaagagaggaggcaagggttctttaatttggagtgtgattgggcatgtccttccccacttcagccagaaatgggcccagaagtaaccccagcacctcgagatgaactggtggaggcagcgtgtgccctgacctgtgactgggcagagcggatcctgaaacggtccttcagttccatcgttgaggtcgcccgcttcctgctacagcagcatctcatctctgcccgatctgcacatgcccatgtgcttaaggccatggggctcgctggtgtgttgaccctctcttatgtctcagcaaccctgagccactttcagcttcagtggccctcccacacactagaatagagacaccttggatttgccccctcttcctggagacccttctaagacatgctttagcaccccatttcctgtctctaccagtcagtcaatcagaattgcctcactcccctattcctcagtttcctcctcaccttcactctattacctttttggtacctctgcagaagaggacgaacatgcacctcgggaacggtcatctaaaccaaagaatggtttagagaacccagagggtggagcccacaagaagccagagagactggcccaggtaaggaagtcagtggccctgactttgctgtcctgggctgggggcttagtatatccttctccaattgggtcccttgcttttccacctcctgtgcctctggcgtctatgtttcccccaatactcattcttcacaccttactgtgttcctctctttactttttagcctcctaaggatctggaagcccgaactggggccggtcctctcgcacgtggagagcggaagaagagtgtagttgagagctcggccccaggagccaataacctgcaggttaatgccctagtggctcggctgcctctgctccttccccgggcccctcgctcactaattccgccaatcccagtctctccacctattctggcccccaggctttcttcaggtgccctgaaagtggctacactgcctctgtctagtagggccggggcacccccagcagctgtgcccatcattaacatgatcttaccaactgttcctgctttgcctggacctggacctgggcctgggcgagctccacctgggggactcactcagccccggggcacagagaacagagaggtaggcataggtggtgaccaaggaccacatgacaagggtgtcaagaggacagctgaagtacctgtgagtgaggccagtgggcaggctccaccagctaaagcagcaaagcaggatatagaggatacagcaagtgatgccaaaaggaaacgggggcgccctcgaaaaaagtcaggtggaagtggggaaaggaattctacccctctcaagtcagcagctgccatggaatctgcccagtcctcaaggttaccatgggagacatggggctcaggaggggaaggcaactcagctggaggggcagagaggccagggccaatgggagaggctgaaaagggggcagtacttgcccagggtcagggagatggtactgtttccaaaggaggaaggggccccggttcccagcataccaaagaagcagaagataaaattcccttggtcccctcaaaagtgagtgtcatcaagggcagcagaagccaaaaggaggcttttcctttggcaaagggagaggtagacactgcaccacagggtaataaagacttaaagga

SEQ ID NO: 13691 - DNA, 2056 bp, Homo sapiens
ttttttttccaagcctagaagggcagaatatgttcgtatcctttctgacctcccaggcatatgcaatgttttccagatttaggagacttcagaaaggtggggcagatagaatggagatggcaaagatctctttgggcatatatgggcctggcgaagtaatggaataatttctaattttcggagaaggcaagtggtgagaaaaagaccaccggggaaattcggaggctttgtttctgtttctctgcctttctggccctcatgccgggatggcagaagatgagcctgatgctaagagccccaagactgggggaagggcccccccaggtggtgctgaggctggggaacctaccacccttcttcagaggctccgaggtaccatttccaaggccgtgcagaacaaagtagaggggatcctgcaagatgtacagaaattttctgacaatgacaagctgtatctctaccttcagctcccctcaggacccaccactggagacaaaagctcagagccaagtacactgagcaatgaggagtacatgtatgcctataggtggatccgcaaccacctggaagagcacactgacacctgtctgccaaagcaaagtgtttatgatgcctatcggaagtactgtgagagtcttgcctgttgccgcccactcagcacagccaactttggcaagatcatcagagagatcttccctgacatcaaagctcgaaggcttggtggccggggccagtccaaatattgctacagtggcataaggaggaagaccttggtgtctatgccacccctgcctggacttgacctaaagggttctgagagtccagaaatgggcccagaagtaaccccagcacctcgagatgaactggtggaggcagcgtgtgccctgacctgtgactgggcagagcggatcctgaaacggtccttcagttccatcgttgaggtcgcccgcttcctgctacagcagcatctcatctctgcccgatctgcacatgcccatgtgcttaaggccatggggctcgctgaagaggacgaacatgcacctcgggaacggtcatctaaaccaaagaatggtttagagaacccagagggtggagcccacaagaagccagagagactggcccagcctcctaaggatctggaagcccgaactggggccggtcctctcgcacgtggagagcggaagaagagtgtagttgagagctcggccccaggagccaataacctgcaggttaatgccctagtggctcggctgcctctgctccttccccgggcccctcgctcactaattccgccaatcccagtctctccacctattctggcccccaggctttcttcaggtgccctgaaagtggctacactgcctctgtctagtagggccggggcacccccagcagctgtgcccatcattaacatgatcttaccaactgttcctgctttgcctggacctggacctgggcctgggcgagctccacctgggggactcactcagccccggggcacagagaacagagaggtaggcataggtggtgaccaaggaccacatgacaagggtgtcaagaggacagctgaagtacctgtgagtgaggccagtgggcaggctccaccagctaaagcagcaaagcaggatatagaggatacagcaagtgatgccaaaaggaaacgggggcgccctcgaaaaaagtcaggtggaagtggggaaaggaattctacccctctcaagtcagcagctgccatggaatctgcccagtcctcaaggttaccatgggagacatggggctcaggaggggaaggcaactcagctggaggggcagagaggccagggccaatgggagaggctgaaaagggggcagtacttgcccagggtcagggagatggtactgtttccaaaggaggaaggggccccggttcccagcataccaaagaagcagaagataaaattcccttggtcccctcaaaagtgagtgtcatcaagggcagcagaagccaaaaggaggcttttcctttggcaaagggagaggtagacactgcaccacagggtaataaagacttaaagga

SEQ ID NO: 13692 - DNA, 2501 bp, Homo sapiens
agtgaaggtggctacgaggtagtttctctttctcccttacctttattgttgcttgtgttggaaggcgactgttcagaggtagggaggggcaagatgagttgggaggagagcagaaaaagattgtagctgtattttcaacagcttcttcacccatgtgcacgtgcccggaatctgggaccccattcccctgccgggtttctgacgcccagcgcatgagttccgctaccccgccccacccccgctccactttgcagaaaccggggattgaatggagggggaagggaaggaggtgggggcgcgcctcaggatgggctgttgtgggagatgacgtaggggccggcgacgtggggagggggagcagcgggggaagtcgtggcgagattaagtaatgagaacttgggcccagttttttttccaagcctagaagggcagaatatgttcgtatcctttctgacctcccaggcatatgcaatggtgaggagtatttttgagaattagagaactttgttttgtggctgttattgttgtttttgagggggaggagggcagtatggggtcagaggcagaaatgaaaatttcttgctaacatggattcccaatccccctatctcttcctttacagttttccagatttaggagacttcagaaaggtggggcagatagaatggagatggcaaagatctctttgggcatatatgggcctggcgaagtaatggaataatttctaattttcggagaaggcaagtggtgagaaaaagaccaccggggaaattcggaggctttgtttctgtttctctgcctttctgggtaaagagatgaggagtgccctggggccttctggggaagggaaggccagtgtgagttacatctttatgcctgtccctctcaattctagccctcatgccgggatggcagaagatgagcctgatgctaagagccccaagactgggggaagggcccccccaggtggtgctgaggctggggaacctaccacccttcttcagaggctccgaggtaccatttcgtaagtactcatcacatctccaagtcctgtccaagacctgagtatagatccctgcagcacttcactttggctgtagatgaactgcctctcagcaagggcatgggagcagagggagatttttggccatggtagcaattcttgagcacctgctgggcatttcagtccttttccctccctagcagtcagataaagagacagggaaaatcttgtgtgtgacctccagctttctcctcttccccacagcaaggccgtgcagaacaaagtagaggggatcctggtaagtgtgttggggaagagggcaagagagggatggaaatgctgagggaggaggatgtgaggatgatgggcatcaacaaaacattgatgtgggagaggtagggtcctctgccttgtcagaagatagttggctttgcaaacttgctgccagtttgactttgtgcctctcacttgatctctgtgagcacttgcatagaagcccagcagagatgaagtcagagctgatcccctctacttccctcctctccatggtagcctatagggctcctcagagcacctagcatcaaataatttctttcttttttttttttttttttgagatggagtctcactctgtcgcctaggctggagtgcagtggcgcaatctcggctcactgcaagctccgcctcccaggttcacgccattctcctgcctcagcctcccaagtagctgggactacaggcgcccgtcaccacacccagctaatttttttttgtatttttagtagaaacggggtttcaccatgttagccaggatggtctcgatctcctgaccttgtgatcagcctgccttggccttccaaagtgctgggattgtaggcgtgagccaccgtgcccggccttgtcaaataatttctaaggtcctttttcagtctgacaccctgtaagtcagctagactttggtgtggggatcagagggtcctatattgggtccttcttggccttattatttctcctgcctctgttctctcctacctcagcaagatgtacagaaattttctgacaatgacaagctgtatctctaccttcagctcccctcaggacccaccactggagacaaaaggtaggtttgatagtagttttagatggcagaggttctgattcttagagaaaggttcactgggaaggggtgaggtgaataggaatactcgtaaatgctgtccttgatgaagaggaaaggtcctcgccctgacttggtttaccagggaaagttagattctgggtgaactaaatttggtccagcactactgaagtggtagtttgggaagaaccaggacaactgttagggtcttagtaatgcttgttccttttgtttctgtagctcagagccaagtacactgagcaatgaggagtacatgtatgcctataggtggatccgcaaccacctggaagagcacactgacacctgtctgccaaagcaaagtgtttatgatgcctatcg

SEQ ID NO: 13693 - DNA, 562 bp, Homo sapiens
agtgaaggtggctacgaggtagtttctctttctcccttacctttattgttgcttgtgttggaaggcgactgttcagagttttccagatttaggagacttcagaaaggtggggcagatagaatggagatggcaaagatctctttgggcatatatgggcctggcgaagtaatggaataatttctaattttcggagaagccctcatgccgggatggcagaagatgagcctgatgctaagagccccaagactgggggaagggcccccccaggtggtgctgaggctggggaacctaccacccttcttcagaggctccgaggtaccatttccaaggccgtgcagaacaaagtagaggggatcctgcaagatgtacagaaattttctgacaatgacaagctgtatctctaccttcagctcccctcaggacccaccactggagacaaaagctcagagccaagtacactgagcaatgaggagtacatgtatgcctataggtggatccgcaaccacctggaagagcacactgacacctgtctgccaaagcaaagtgtttatgatgcctatcg

SEQ ID NO: 13694 - DNA, 2692 bp, Homo sapiens
tttctctttctcccttacctttattgttgcttgtgttggaaggcgactgttcagaggtagggaggggcaagatgagttgggaggagagcagaaaaagattgtagctgtattttcaacagcttcttcacccatgtgcacgtgcccggaatctgggaccccattcccctgccgggtttctgacgcccagcgcatgagttccgctaccccgccccacccccgctccactttgcagaaaccggggattgaatggagggggaagggaaggaggtgggggcgcgcctcaggatgggctgttgtgggagatgacgtaggggccggcgacgtggggagggggagcagcgggggaagtcgtggcgagattaagtaatgagaacttgggcccagttttttttccaagcctagaagggcagaatatgttcgtatcctttctgacctcccaggcatatgcaatggtgaggagtatttttgagaattagagaactttgttttgtggctgttattgttgtttttgagggggaggagggcagtatggggtcagaggcagaaatgaaaatttcttgctaacatggattcccaatccccctatctcttcctttacagttttccagatttaggagacttcagaaaggtggggcagatagaatggagatggcaaagatctctttgggcatatatgggcctggcgaagtaatggaataatttctaattttcggagaaggcaagtggtgagaaaaagaccaccggggaaattcggaggctttgtttctgtttctctgcctttctgggtaaagagatgaggagtgccctggggccttctggggaagggaaggccagtgtgagttacatctttatgcctgtccctctcaattctagccctcatgccgggatggcagaagatgagcctgatgctaagagccccaagactgggggaagggcccccccaggtggtgctgaggctggggaacctaccacccttcttcagaggctccgaggtaccatttcgtaagtactcatcacatctccaagtcctgtccaagacctgagtatagatccctgcagcacttcactttggctgtagatgaactgcctctcagcaagggcatgggagcagagggagatttttggccatggtagcaattcttgagcacctgctgggcatttcagtccttttccctccctagcagtcagataaagagacagggaaaatcttgtgtgtgacctccagctttctcctcttccccacagcaaggccgtgcagaacaaagtagaggggatcctggtaagtgtgttggggaagagggcaagagagggatggaaatgctgagggaggaggatgtgaggatgatgggcatcaacaaaacattgatgtgggagaggtagggtcctctgccttgtcagaagatagttggctttgcaaacttgctgccagtttgactttgtgcctctcacttgatctctgtgagcacttgcatagaagcccagcagagatgaagtcagagctgatcccctctacttccctcctctccatggtagcctatagggctcctcagagcacctagcatcaaataatttctttcttttttttttttttttttgagatggagtctcactctgtcgcctaggctggagtgcagtggcgcaatctcggctcactgcaagctccgcctcccaggttcacgccattctcctgcctcagcctcccaagtagctgggactacaggcgcccgtcaccacacccagctaatttttttttgtatttttagtagaaacggggtttcaccatgttagccaggatggtctcgatctcctgaccttgtgatcagcctgccttggccttccaaagtgctgggattgtaggcgtgagccaccgtgcccggccttgtcaaataatttctaaggtcctttttcagtctgacaccctgtaagtcagctagactttggtgtggggatcagagggtcctatattgggtccttcttggccttattatttctcctgcctctgttctctcctacctcagcaagatgtacagaaattttctgacaatgacaagctgtatctctaccttcagctcccctcaggacccaccactggagacaaaaggtaggtttgatagtagttttagatggcagaggttctgattcttagagaaaggttcactgggaaggggtgaggtgaataggaatactcgtaaatgctgtccttgatgaagaggaaaggtcctcgccctgacttggtttaccagggaaagttagattctgggtgaactaaatttggtccagcactactgaagtggtagtttgggaagaaccaggacaactgttagggtcttagtaatgcttgttccttttgtttctgtagctcagagccaagtacactgagcaatgaggagtacatgtatgcctataggtggatccgcaaccacctggaagagcacactgacacctgtctgccaaagcaaagtgtttatgatgcctatcggtgggtggaggggtgggtggtgggatgagtggattggtgggcataggaccccctcacccatgaagagcttcctgccttgataaagcctgccttcttaaagggttcctcacacttgatccctagggactcttcgagcctacccatggcctccttctctgagtatcttcccactctgctcccctctcactcaggaagtactgtgagagtcttgcc

SEQ ID NO: 13695 - DNA, 558 bp, Homo sapiens
tttctctttctcccttacctttattgttgcttgtgttggaaggcgactgttcagagttttccagatttaggagacttcagaaaggtggggcagatagaatggagatggcaaagatctctttgggcatatatgggcctggcgaagtaatggaataatttctaattttcggagaagccctcatgccgggatggcagaagatgagcctgatgctaagagccccaagactgggggaagggcccccccaggtggtgctgaggctggggaacctaccacccttcttcagaggctccgaggtaccatttcgccgtgcagaacaaagtagaggggatcctgcaagatgtacagaaattttctgacaatgacaagctgtatctctaccttcagctcccctcaggacccaccactggagacaaaagctcagagccaagtacactgagcaatgaggagtacatgtatgcctataggtggatccgcaaccacctggaagagcacactgacacctgtctgccaaagcaaagtgtttatgatgcctatcggaagtactgtgagagtcttgcc

SEQ ID NO: 13696 - DNA, 3273 bp, Homo sapiens
agcgcatgagttccgctaccccgccccacccccgctccactttgcagaaaccggggattgaatggagggggaagggaaggaggtgggggcgcgcctcaggatgggctgttgtgggagatgacgtaggggccggcgacgtggggagggggagcagcgggggaagtcgtggcgagattaagtaatgagaacttgggcccagttttttttccaagcctagaagggcagaatatgttcgtatcctttctgacctcccaggcatatgcaatggtgaggagtatttttgagaattagagaactttgttttgtggctgttattgttgtttttgagggggaggagggcagtatggggtcagaggcagaaatgaaaatttcttgctaacatggattcccaatccccctatctcttcctttacagttttccagatttaggagacttcagaaaggtggggcagatagaatggagatggcaaagatctctttgggcatatatgggcctggcgaagtaatggaataatttctaattttcggagaaggcaagtggtgagaaaaagaccaccggggaaattcggaggctttgtttctgtttctctgcctttctgggtaaagagatgaggagtgccctggggccttctggggaagggaaggccagtgtgagttacatctttatgcctgtccctctcaattctagccctcatgccgggatggcagaagatgagcctgatgctaagagccccaagactgggggaagggcccccccaggtggtgctgaggctggggaacctaccacccttcttcagaggctccgaggtaccatttcgtaagtactcatcacatctccaagtcctgtccaagacctgagtatagatccctgcagcacttcactttggctgtagatgaactgcctctcagcaagggcatgggagcagagggagatttttggccatggtagcaattcttgagcacctgctgggcatttcagtccttttccctccctagcagtcagataaagagacagggaaaatcttgtgtgtgacctccagctttctcctcttccccacagcaaggccgtgcagaacaaagtagaggggatcctggtaagtgtgttggggaagagggcaagagagggatggaaatgctgagggaggaggatgtgaggatgatgggcatcaacaaaacattgatgtgggagaggtagggtcctctgccttgtcagaagatagttggctttgcaaacttgctgccagtttgactttgtgcctctcacttgatctctgtgagcacttgcatagaagcccagcagagatgaagtcagagctgatcccctctacttccctcctctccatggtagcctatagggctcctcagagcacctagcatcaaataatttctttcttttttttttttttttttgagatggagtctcactctgtcgcctaggctggagtgcagtggcgcaatctcggctcactgcaagctccgcctcccaggttcacgccattctcctgcctcagcctcccaagtagctgggactacaggcgcccgtcaccacacccagctaatttttttttgtatttttagtagaaacggggtttcaccatgttagccaggatggtctcgatctcctgaccttgtgatcagcctgccttggccttccaaagtgctgggattgtaggcgtgagccaccgtgcccggccttgtcaaataatttctaaggtcctttttcagtctgacaccctgtaagtcagctagactttggtgtggggatcagagggtcctatattgggtccttcttggccttattatttctcctgcctctgttctctcctacctcagcaagatgtacagaaattttctgacaatgacaagctgtatctctaccttcagctcccctcaggacccaccactggagacaaaaggtaggtttgatagtagttttagatggcagaggttctgattcttagagaaaggttcactgggaaggggtgaggtgaataggaatactcgtaaatgctgtccttgatgaagaggaaaggtcctcgccctgacttggtttaccagggaaagttagattctgggtgaactaaatttggtccagcactactgaagtggtagtttgggaagaaccaggacaactgttagggtcttagtaatgcttgttccttttgtttctgtagctcagagccaagtacactgagcaatgaggagtacatgtatgcctataggtggatccgcaaccacctggaagagcacactgacacctgtctgccaaagcaaagtgtttatgatgcctatcggtgggtggaggggtgggtggtgggatgagtggattggtgggcataggaccccctcacccatgaagagcttcctgccttgataaagcctgccttcttaaagggttcctcacacttgatccctagggactcttcgagcctacccatggcctccttctctgagtatcttcccactctgctcccctctcactcaggaagtactgtgagagtcttgcctgttgccgcccactcagcacagccaactttggcaagatcatcagagagatcttccctgacatcaaagctcgaaggcttggtggccggggccagtccaagtatccttgactagagaggttgggggtggaggacctgggaggaagacttaggatgtggagagcaaggagtggaacagcttaacttgctcgaggggcttggagatcgccatgtgttggctgctctttaacttgcatcagatattgctacagtggcataaggaggaagaccttggtgtctatgccacccctgcctggacttgacctaaagggttctgagagtgtaagtaccaaatcaccttccaattccactcttctctcccaggtaaaagtcagaggtctttggggcatgttttgagggctaacagcctcagtcattatgtacatagcttctaggtatgatgttcccttctgccaaccctgtagctgaggcagaggatgaagagaacttgtgggcttctgcaatgggataggtagaggctactcccatccccagtctggtctcagctttggtcaatagtctttgatctctgacaagagaggaggcaagggttctttaatttggagtgtgattgggcatgtccttccccacttcagccagaaatgggcccagaagtaaccccagcacctcgagatgaactggtggaggcagcgtgtgccctgacctgtgactgggcagagcggatcctgaaacggtccttcagttccatcgttgaggtcgcccgcttcct

SEQ ID NO: 13697 - DNA, 902 bp, Homo sapiens
agcgcatgagttccgctaccccgccccacccccgctccactttgcagaaaccggggattgaatggagggggaagggaaggagttttccagatttaggagacttcagaaaggtggggcagatagaatggagatggcaaagatctctttgggcatatatgggcctggcgaagtaatggaataatttctaattttcggagaagccctcatgccgggatggcagaagatgagcctgatgctaagagccccaagactgggggaagggcccccccaggtggtgctgaggctggggaacctaccacccttcttcagaggctccgaggtaccatttccaaggccgtgcagaacaaagtagaggggatcctgcaagatgtacagaaattttctgacaatgacaagctgtatctctaccttcagctcccctcaggacccaccactggagacaaaagctcagagccaagtacactgagcaatgaggagtacatgtatgcctataggtggatccgcaaccacctggaagagcacactgacacctgtctgccaaagcaaagtgtttatgatgcctatcggaagtactgtgagagtcttgcctgttgccgcccactcagcacagccaactttggcaagatcatcagagagatcttccctgacatcaaagctcgaaggcttggtggccggggccagtccaaatattgctacagtggcataaggaggaagaccttggtgtctatgccacccctgcctggacttgacctaaagggttctgagagtccagaaatgggcccagaagtaaccccagcacctcgagatgaactggtggaggcagcgtgtgccctgacctgtgactgggcagagcggatcctgaaacggtccttcagttccatcgttgaggtcgcccgcttcct

SEQ ID NO: 13698 - DNA, 2708 bp, Homo sapiens
agtgaaggtggctacgaggtagtttctctttctcccttacctttattgttgcttgtgttggaaggcgactgttcagaggtagggaggggcaagatgagttgggaggagagcagaaaaagattgtagctgtattttcaacagcttcttcacccatgtgcacgtgcccggaatctgggaccccattcccctgccgggtttctgacgcccagcgcatgagttccgctaccccgccccacccccgctccactttgcagaaaccggggattgaatggagggggaagggaaggaggtgggggcgcgcctcaggatgggctgttgtgggagatgacgtaggggccggcgacgtggggagggggagcagcgggggaagtcgtggcgagattaagtaatgagaacttgggcccagttttttttccaagcctagaagggcagaatatgttcgtatcctttctgacctcccaggcatatgcaatggtgaggagtatttttgagaattagagaactttgttttgtggctgttattgttgtttttgagggggaggagggcagtatggggtcagaggcagaaatgaaaatttcttgctaacatggattcccaatccccctatctcttcctttacagttttccagatttaggagacttcagaaaggtggggcagatagaatggagatggcaaagatctctttgggcatatatgggcctggcgaagtaatggaataatttctaattttcggagaaggcaagtggtgagaaaaagaccaccggggaaattcggaggctttgtttctgtttctctgcctttctgggtaaagagatgaggagtgccctggggccttctggggaagggaaggccagtgtgagttacatctttatgcctgtccctctcaattctagccctcatgccgggatggcagaagatgagcctgatgctaagagccccaagactgggggaagggcccccccaggtggtgctgaggctggggaacctaccacccttcttcagaggctccgaggtaccatttcgtaagtactcatcacatctccaagtcctgtccaagacctgagtatagatccctgcagcacttcactttggctgtagatgaactgcctctcagcaagggcatgggagcagagggagatttttggccatggtagcaattcttgagcacctgctgggcatttcagtccttttccctccctagcagtcagataaagagacagggaaaatcttgtgtgtgacctccagctttctcctcttccccacagcaaggccgtgcagaacaaagtagaggggatcctggtaagtgtgttggggaagagggcaagagagggatggaaatgctgagggaggaggatgtgaggatgatgggcatcaacaaaacattgatgtgggagaggtagggtcctctgccttgtcagaagatagttggctttgcaaacttgctgccagtttgactttgtgcctctcacttgatctctgtgagcacttgcatagaagcccagcagagatgaagtcagagctgatcccctctacttccctcctctccatggtagcctatagggctcctcagagcacctagcatcaaataatttctttcttttttttttttttttttgagatggagtctcactctgtcgcctaggctggagtgcagtggcgcaatctcggctcactgcaagctccgcctcccaggttcacgccattctcctgcctcagcctcccaagtagctgggactacaggcgcccgtcaccacacccagctaatttttttttgtatttttagtagaaacggggtttcaccatgttagccaggatggtctcgatctcctgaccttgtgatcagcctgccttggccttccaaagtgctgggattgtaggcgtgagccaccgtgcccggccttgtcaaataatttctaaggtcctttttcagtctgacaccctgtaagtcagctagactttggtgtggggatcagagggtcctatattgggtccttcttggccttattatttctcctgcctctgttctctcctacctcagcaagatgtacagaaattttctgacaatgacaagctgtatctctaccttcagctcccctcaggacccaccactggagacaaaaggtaggtttgatagtagttttagatggcagaggttctgattcttagagaaaggttcactgggaaggggtgaggtgaataggaatactcgtaaatgctgtccttgatgaagaggaaaggtcctcgccctgacttggtttaccagggaaagttagattctgggtgaactaaatttggtccagcactactgaagtggtagtttgggaagaaccaggacaactgttagggtcttagtaatgcttgttccttttgtttctgtagctcagagccaagtacactgagcaatgaggagtacatgtatgcctataggtggatccgcaaccacctggaagagcacactgacacctgtctgccaaagcaaagtgtttatgatgcctatcggtgggtggaggggtgggtggtgggatgagtggattggtgggcataggaccccctcacccatgaagagcttcctgccttgataaagcctgccttcttaaagggttcctcacacttgatccctagggactcttcgagcctacccatggcctccttctctgagtatcttcccactctgctcccctctcactcaggaagtactgtgagagt

SEQ ID NO: 13699 - DNA, 585 bp, Homo sapiens
agtgaaggtggctacgaggtagtttctctttctcccttacctttattgttgcttgtgttggaaggcgactgttcagagttttccagatttaggagacttcagaaaggtggggcagatagaatggagatggcaaagatctctttgggcatatatgggcctggcgaagtaatggaataatttctaattttcggagaaggcaagtgccctcatgccgggatggcagaagatgagcctgatgctaagagccccaagactgggggaagggcccccccaggtggtgctgaggctggggaacctaccacccttcttcagaggctccgaggtaccatttccaaggccgtgcagaacaaagtagaggggatcctgcaagatgtacagaaattttctgacaatgacaagctgtatctctaccttcagctcccctcaggacccaccactggagacaaaagctcagagccaagtacactgagcaatgaggagtacatgtatgcctataggtggatccgcaaccacctggaagagcacactgacacctgtctgccaaagcaaagtgtttatgatgcctatcggaagtactgtgagagt

SEQ ID NO: 13700 - DNA, 2259 bp, Homo sapiens
ttttccaagcctagaagggcagaatatgttcgtatcctttctgacctcccaggcatatgcaatggtgaggagtatttttgagaattagagaactttgttttgtggctgttattgttgtttttgagggggaggagggcagtatggggtcagaggcagaaatgaaaatttcttgctaacatggattcccaatccccctatctcttcctttacagttttccagatttaggagacttcagaaaggtggggcagatagaatggagatggcaaagatctctttgggcatatatgggcctggcgaagtaatggaataatttctaattttcggagaaggcaagtggtgagaaaaagaccaccggggaaattcggaggctttgtttctgtttctctgcctttctgggtaaagagatgaggagtgccctggggccttctggggaagggaaggccagtgtgagttacatctttatgcctgtccctctcaattctagccctcatgccgggatggcagaagatgagcctgatgctaagagccccaagactgggggaagggcccccccaggtggtgctgaggctggggaacctaccacccttcttcagaggctccgaggtaccatttcgtaagtactcatcacatctccaagtcctgtccaagacctgagtatagatccctgcagcacttcactttggctgtagatgaactgcctctcagcaagggcatgggagcagagggagatttttggccatggtagcaattcttgagcacctgctgggcatttcagtccttttccctccctagcagtcagataaagagacagggaaaatcttgtgtgtgacctccagctttctcctcttccccacagcaaggccgtgcagaacaaagtagaggggatcctggtaagtgtgttggggaagagggcaagagagggatggaaatgctgagggaggaggatgtgaggatgatgggcatcaacaaaacattgatgtgggagaggtagggtcctctgccttgtcagaagatagttggctttgcaaacttgctgccagtttgactttgtgcctctcacttgatctctgtgagcacttgcatagaagcccagcagagatgaagtcagagctgatcccctctacttccctcctctccatggtagcctatagggctcctcagagcacctagcatcaaataatttctttcttttttttttttttttttgagatggagtctcactctgtcgcctaggctggagtgcagtggcgcaatctcggctcactgcaagctccgcctcccaggttcacgccattctcctgcctcagcctcccaagtagctgggactacaggcgcccgtcaccacacccagctaatttttttttgtatttttagtagaaacggggtttcaccatgttagccaggatggtctcgatctcctgaccttgtgatcagcctgccttggccttccaaagtgctgggattgtaggcgtgagccaccgtgcccggccttgtcaaataatttctaaggtcctttttcagtctgacaccctgtaagtcagctagactttggtgtggggatcagagggtcctatattgggtccttcttggccttattatttctcctgcctctgttctctcctacctcagcaagatgtacagaaattttctgacaatgacaagctgtatctctaccttcagctcccctcaggacccaccactggagacaaaaggtaggtttgatagtagttttagatggcagaggttctgattcttagagaaaggttcactgggaaggggtgaggtgaataggaatactcgtaaatgctgtccttgatgaagaggaaaggtcctcgccctgacttggtttaccagggaaagttagattctgggtgaactaaatttggtccagcactactgaagtggtagtttgggaagaaccaggacaactgttagggtcttagtaatgcttgttccttttgtttctgtagctcagagccaagtacactgagcaatgaggagtacatgtatgcctataggtggatccgcaaccacctggaagagcacactgacacctgtctgccaaagcaaagtgtttatgatgcctatcggtgggtggaggggtgggtggtgggatgagtggattggtgggcataggaccccctcacccatgaagagcttcctgccttgataaagcctgccttcttaaagggttcctcacacttgatccctagggactcttcgagcctacccatggcctccttctctgagtatcttcc

SEQ ID NO: 13701 - DNA, 583 bp, Homo sapiens
ttttccaagcctagaagggcagaatatgttcgtatcctttctgacctcccaggcatatgcaatgttttccagatttaggagacttcagaaaggtggggcagatagaatggagatggcaaagatctctttgggcatatatgggcctggcgaagtaatggaataatttctaattttcggagaagccctcatgccgggatggcagaagatgagcctgatgctaagagccccaagactgggggaagggcccccccaggtggtgctgaggctggggaacctaccacccttcttcagaggctccgagcaaggccgtgcagaacaaagtagaggggatcctgcaagatgtacagaaattttctgacaatgacaagctgtatctctaccttcagctcccctcaggacccaccactggagacaaaagctcagagccaagtacactgagcaatgaggagtacatgtatgcctataggtggatccgcaaccacctggaagagcacactgacacctgtctgccaaagcaaagtgtttatgatgcctatcgggactcttcgagcctacccatggcctccttctctgagtatcttcc

SEQ ID NO: 13702 - DNA, 2081 bp, Homo sapiens
agcagcgggggaagtcgtggcgagattaagtaatgagaacttgggcccagttttttttccaagcctagaagggcagaatatgttcgtatcctttctgacctcccaggcatatgcaatggtgaggagtatttttgagaattagagaactttgttttgtggctgttattgttgtttttgagggggaggagggcagtatggggtcagaggcagaaatgaaaatttcttgctaacatggattcccaatccccctatctcttcctttacagttttccagatttaggagacttcagaaaggtggggcagatagaatggagatggcaaagatctctttgggcatatatgggcctggcgaagtaatggaataatttctaattttcggagaaggcaagtggtgagaaaaagaccaccggggaaattcggaggctttgtttctgtttctctgcctttctgggtaaagagatgaggagtgccctggggccttctggggaagggaaggccagtgtgagttacatctttatgcctgtccctctcaattctagccctcatgccgggatggcagaagatgagcctgatgctaagagccccaagactgggggaagggcccccccaggtggtgctgaggctggggaacctaccacccttcttcagaggctccgaggtaccatttcgtaagtactcatcacatctccaagtcctgtccaagacctgagtatagatccctgcagcacttcactttggctgtagatgaactgcctctcagcaagggcatgggagcagagggagatttttggccatggtagcaattcttgagcacctgctgggcatttcagtccttttccctccctagcagtcagataaagagacagggaaaatcttgtgtgtgacctccagctttctcctcttccccacagcaaggccgtgcagaacaaagtagaggggatcctggtaagtgtgttggggaagagggcaagagagggatggaaatgctgagggaggaggatgtgaggatgatgggcatcaacaaaacattgatgtgggagaggtagggtcctctgccttgtcagaagatagttggctttgcaaacttgctgccagtttgactttgtgcctctcacttgatctctgtgagcacttgcatagaagcccagcagagatgaagtcagagctgatcccctctacttccctcctctccatggtagcctatagggctcctcagagcacctagcatcaaataatttctttcttttttttttttttttttgagatggagtctcactctgtcgcctaggctggagtgcagtggcgcaatctcggctcactgcaagctccgcctcccaggttcacgccattctcctgcctcagcctcccaagtagctgggactacaggcgcccgtcaccacacccagctaatttttttttgtatttttagtagaaacggggtttcaccatgttagccaggatggtctcgatctcctgaccttgtgatcagcctgccttggccttccaaagtgctgggattgtaggcgtgagccaccgtgcccggccttgtcaaataatttctaaggtcctttttcagtctgacaccctgtaagtcagctagactttggtgtggggatcagagggtcctatattgggtccttcttggccttattatttctcctgcctctgttctctcctacctcagcaagatgtacagaaattttctgacaatgacaagctgtatctctaccttcagctcccctcaggacccaccactggagacaaaaggtaggtttgatagtagttttagatggcagaggttctgattcttagagaaaggttcactgggaaggggtgaggtgaataggaatactcgtaaatgctgtccttgatgaagaggaaaggtcctcgccctgacttggtttaccagggaaagttagattctgggtgaactaaatttggtccagcactactgaagtggtagtttgggaagaaccaggacaactgttagggtcttagtaatgcttgttccttttgtttctgtagctcagagccaagtacactgagcaatgaggagtacatgtatgcctataggtggatcc

SEQ ID NO: 13703 - DNA, 545 bp, Homo sapiens
agcagcgggggaagtcgtggcgagattaagtaatgagaacttgggcccagttttttttccaagcctagaagggcagaatatgttcgtatcctttctgacctcccaggcatatgcaatgttttccagatttaggagacttcagaaaggtggggcagatagaatggagatggcaaagatctctttgggcatatatgggcctggcgaagtaatggaataatttctaattttcggagaaggcaagtgccctcatgccgggatggcagaagatgagcctgatgctaagagccccaagactgggggaagggcccccccaggtggtgctgaggctggggaacctaccacccttcttcagaggctccgaggtaccatttccaaggccgtgcagaacaaagtagaggggatcctgcaagatgtacagaaattttctgacaatgacaagctgtatctctaccttcagctcccctcaggacccaccactggagacaaaagctcagagccaagtacactgagcaatgaggagtacatgtatgcctataggtggatcc

SEQ ID NO: 13704 - DNA, 2797 bp, Homo sapiens
ccaaagcaaagtgtttatgatgcctatcggtgggtggaggggtgggtggtgggatgagtggattggtgggcataggaccccctcacccatgaagagcttcctgccttgataaagcctgccttcttaaagggttcctcacacttgatccctagggactcttcgagcctacccatggcctccttctctgagtatcttcccactctgctcccctctcactcaggaagtactgtgagagtcttgcctgttgccgcccactcagcacagccaactttggcaagatcatcagagagatcttccctgacatcaaagctcgaaggcttggtggccggggccagtccaagtatccttgactagagaggttgggggtggaggacctgggaggaagacttaggatgtggagagcaaggagtggaacagcttaacttgctcgaggggcttggagatcgccatgtgttggctgctctttaacttgcatcagatattgctacagtggcataaggaggaagaccttggtgtctatgccacccctgcctggacttgacctaaagggttctgagagtgtaagtaccaaatcaccttccaattccactcttctctcccaggtaaaagtcagaggtctttggggcatgttttgagggctaacagcctcagtcattatgtacatagcttctaggtatgatgttcccttctgccaaccctgtagctgaggcagaggatgaagagaacttgtgggcttctgcaatgggataggtagaggctactcccatccccagtctggtctcagctttggtcaatagtctttgatctctgacaagagaggaggcaagggttctttaatttggagtgtgattgggcatgtccttccccacttcagccagaaatgggcccagaagtaaccccagcacctcgagatgaactggtggaggcagcgtgtgccctgacctgtgactgggcagagcggatcctgaaacggtccttcagttccatcgttgaggtcgcccgcttcctgctacagcagcatctcatctctgcccgatctgcacatgcccatgtgcttaaggccatggggctcgctggtgtgttgaccctctcttatgtctcagcaaccctgagccactttcagcttcagtggccctcccacacactagaatagagacaccttggatttgccccctcttcctggagacccttctaagacatgctttagcaccccatttcctgtctctaccagtcagtcaatcagaattgcctcactcccctattcctcagtttcctcctcaccttcactctattacctttttggtacctctgcagaagaggacgaacatgcacctcgggaacggtcatctaaaccaaagaatggtttagagaacccagagggtggagcccacaagaagccagagagactggcccaggtaaggaagtcagtggccctgactttgctgtcctgggctgggggcttagtatatccttctccaattgggtcccttgcttttccacctcctgtgcctctggcgtctatgtttcccccaatactcattcttcacaccttactgtgttcctctctttactttttagcctcctaaggatctggaagcccgaactggggccggtcctctcgcacgtggagagcggaagaagagtgtagttgagagctcggccccaggagccaataacctgcaggttaatgccctagtggctcggctgcctctgctccttccccgggcccctcgctcactaattccgccaatcccagtctctccacctattctggcccccaggctttcttcaggtgccctgaaagtggctacactgcctctgtctagtagggccggggcacccccagcagctgtgcccatcattaacatgatcttaccaactgttcctgctttgcctggacctggacctgggcctgggcgagctccacctgggggactcactcagccccggggcacagagaacagagaggtaggcataggtggtgaccaaggaccacatgacaagggtgtcaagaggacagctgaagtacctgtgagtgaggccagtgggcaggctccaccagctaaagcagcaaagcaggatatagaggatacagcaagtgatgccaaaaggaaacgggggcgccctcgaaaaaagtcaggtggaagtggggaaaggaattctacccctctcaagtcagcagctgccatggaatctgcccagtcctcaaggttaccatgggagacatggggctcaggaggggaaggcaactcagctggaggggcagagaggccagggccaatgggagaggctgaaaagggggcagtacttgcccagggtcagggagatggtactgtttccaaaggaggaaggggccccggttcccagcataccaaagaagcagaagataaaattcccttggtcccctcaaaagtgagtgtcatcaagggcagcagaagccaaaaggaggcttttcctttggcaaagggagaggtagacactgcaccacagggtaataaagacttaaaggagcatgtgcttcaaagttccttatcccaggagcataaagacccaaaagcaacacccccatgatacaggtctgtggggaagagtgtttatatccctacgttaactttgcctagtagaggcccttctttgcacttgcttctcatttggctattcttttcctaaggaagtccattctcctctgtacagacagctgagtcacccagtctacttagtacctggttgctgcctctgaccttttcagcttgataccctgggctttagtgtaaccaataaatctgtagtgacctta

SEQ ID NO: 13705 - DNA, 765 bp, Homo sapiens
ccaaagcaaagtgtttatgatgcctatcggaagtactgtgagagtcttgcctgttgccgcccactcagcacagccaactttggcaagatcatcagagagatcttccctgacatcaaagctcgaaggcttggtggccggggccagtccaaatattgctacagtggcataaggaggaagaccttggtgtctatgccacccctgcctggacttgacctaaagggttctgagagtccagaaatgggcccagaagtaaccccagcacctcgagatgaactggtggaggcagcgtgtgccctgacctgtgactgggcagagcggatcctgaaacggtccttcagttccatcgttgaggtcgcccgcttcctgctacagcagcatctcatctctgcccgatctgcacatgcccatgtgcttaaggccatggggctcgctgaagaggacgaacatgcacctcgggaacggtcatctaaaccaaagaatggtttagagaacccagagggtggagcccacaagaagccagagagactggcccagcctcctaaggatctggaagcccgaactggggccggtcctctcgcacgtggagagcggaagaagagtgtagttgagagctcggccccaggagccaataacctgcaggaagtccattctcctctgtacagacagctgagtcacccagtctacttagtacctggttgctgcctctgaccttttcagcttgataccctgggctttagtgtaaccaataaatctgtagtgacctta

SEQ ID NO: 13706 - DNA, 2529 bp, Homo sapiens
ttcagaaaaaggaaaataaagcaacgcacgagccggctgggccaggaccttggggctgggctggagtgaaggtggctacgaggtagtttctctttctcccttacctttattgttgcttgtgttggaaggcgactgttcagaggtagggaggggcaagatgagttgggaggagagcagaaaaagattgtagctgtattttcaacagcttcttcacccatgtgcacgtgcccggaatctgggaccccattcccctgccgggtttctgacgcccagcgcatgagttccgctaccccgccccacccccgctccactttgcagaaaccggggattgaatggagggggaagggaaggaggtgggggcgcgcctcaggatgggctgttgtgggagatgacgtaggggccggcgacgtggggagggggagcagcgggggaagtcgtggcgagattaagtaatgagaacttgggcccagttttttttccaagcctagaagggcagaatatgttcgtatcctttctgacctcccaggcatatgcaatggtgaggagtatttttgagaattagagaactttgttttgtggctgttattgttgtttttgagggggaggagggcagtatggggtcagaggcagaaatgaaaatttcttgctaacatggattcccaatccccctatctcttcctttacagttttccagatttaggagacttcagaaaggtggggcagatagaatggagatggcaaagatctctttgggcatatatgggcctggcgaagtaatggaataatttctaattttcggagaaggcaagtggtgagaaaaagaccaccggggaaattcggaggctttgtttctgtttctctgcctttctgggtaaagagatgaggagtgccctggggccttctggggaagggaaggccagtgtgagttacatctttatgcctgtccctctcaattctagccctcatgccgggatggcagaagatgagcctgatgctaagagccccaagactgggggaagggcccccccaggtggtgctgaggctggggaacctaccacccttcttcagaggctccgaggtaccatttcgtaagtactcatcacatctccaagtcctgtccaagacctgagtatagatccctgcagcacttcactttggctgtagatgaactgcctctcagcaagggcatgggagcagagggagatttttggccatggtagcaattcttgagcacctgctgggcatttcagtccttttccctccctagcagtcagataaagagacagggaaaatcttgtgtgtgacctccagctttctcctcttccccacagcaaggccgtgcagaacaaagtagaggggatcctggtaagtgtgttggggaagagggcaagagagggatggaaatgctgagggaggaggatgtgaggatgatgggcatcaacaaaacattgatgtgggagaggtagggtcctctgccttgtcagaagatagttggctttgcaaacttgctgccagtttgactttgtgcctctcacttgatctctgtgagcacttgcatagaagcccagcagagatgaagtcagagctgatcccctctacttccctcctctccatggtagcctatagggctcctcagagcacctagcatcaaataatttctttcttttttttttttttttttgagatggagtctcactctgtcgcctaggctggagtgcagtggcgcaatctcggctcactgcaagctccgcctcccaggttcacgccattctcctgcctcagcctcccaagtagctgggactacaggcgcccgtcaccacacccagctaatttttttttgtatttttagtagaaacggggtttcaccatgttagccaggatggtctcgatctcctgaccttgtgatcagcctgccttggccttccaaagtgctgggattgtaggcgtgagccaccgtgcccggccttgtcaaataatttctaaggtcctttttcagtctgacaccctgtaagtcagctagactttggtgtggggatcagagggtcctatattgggtccttcttggccttattatttctcctgcctctgttctctcctacctcagcaagatgtacagaaattttctgacaatgacaagctgtatctctaccttcagctcccctcaggacccaccactggagacaaaaggtaggtttgatagtagttttagatggcagaggttctgattcttagagaaaggttcactgggaaggggtgaggtgaataggaatactcgtaaatgctgtccttgatgaagaggaaaggtcctcgccctgacttggtttaccagggaaagttagattctgggtgaactaaatttggtccagcactactgaagtggtagtttgggaagaaccaggacaactgttagggtcttagtaatgcttgttccttttgtttctgtagctcagagccaagtacactgagcaatgaggagtacatgtatgcctataggtggatccgcaaccacctggaagagcacactgacac

SEQ ID NO: 13707 - DNA, 597 bp, Homo sapiens
ttcagaaaaaggaaaataaagcaacgcacgagccggctgggccaggaccttggggctgggctggagtgaaggtggctacgagttttccagatttaggagacttcagaaaggtggggcagatagaatggagatggcaaagatctctttgggcatatatgggcctggcgaagtaatggaataatttctaattttcggagaaggcaagtggtgagaaaaagaccaccggggaaattcggaggctttgtttctgtttctctgcctttctggccctcatgccgggatggcagaagatgagcctgatgctaagagccccaagactgggggaagggcccccccaggtggtgctgaggctggggaacctaccacccttcttcagaggctccgaggtaccatttccaaggccgtgcagaacaaagtagaggggatcctgcaagatgtacagaaattttctgacaatgacaagctgtatctctaccttcagctcccctcaggacccaccactggagacaaaagctcagagccaagtacactgagcaatgaggagtacatgtatgcctataggtggatccgcaaccacctggaagagcacactgacac

SEQ ID NO: 13708 - DNA, 2172 bp, Homo sapiens
attcagaaaaaggaaaataaagcaacgcacgagccggctgggccaggaccttggggctgggctggagtgaaggtggctacgaggtagtttctctttctcccttacctttattgttgcttgtgttggaaggcgactgttcagaggtagggaggggcaagatgagttgggaggagagcagaaaaagattgtagctgtattttcaacagcttcttcacccatgtgcacgtgcccggaatctgggaccccattcccctgccgggtttctgacgcccagcgcatgagttccgctaccccgccccacccccgctccactttgcagaaaccggggattgaatggagggggaagggaaggaggtgggggcgcgcctcaggatgggctgttgtgggagatgacgtaggggccggcgacgtggggagggggagcagcgggggaagtcgtggcgagattaagtaatgagaacttgggcccagttttttttccaagcctagaagggcagaatatgttcgtatcctttctgacctcccaggcatatgcaatggtgaggagtatttttgagaattagagaactttgttttgtggctgttattgttgtttttgagggggaggagggcagtatggggtcagaggcagaaatgaaaatttcttgctaacatggattcccaatccccctatctcttcctttacagttttccagatttaggagacttcagaaaggtggggcagatagaatggagatggcaaagatctctttgggcatatatgggcctggcgaagtaatggaataatttctaattttcggagaaggcaagtggtgagaaaaagaccaccggggaaattcggaggctttgtttctgtttctctgcctttctgggtaaagagatgaggagtgccctggggccttctggggaagggaaggccagtgtgagttacatctttatgcctgtccctctcaattctagccctcatgccgggatggcagaagatgagcctgatgctaagagccccaagactgggggaagggcccccccaggtggtgctgaggctggggaacctaccacccttcttcagaggctccgaggtaccatttcgtaagtactcatcacatctccaagtcctgtccaagacctgagtatagatccctgcagcacttcactttggctgtagatgaactgcctctcagcaagggcatgggagcagagggagatttttggccatggtagcaattcttgagcacctgctgggcatttcagtccttttccctccctagcagtcagataaagagacagggaaaatcttgtgtgtgacctccagctttctcctcttccccacagcaaggccgtgcagaacaaagtagaggggatcctggtaagtgtgttggggaagagggcaagagagggatggaaatgctgagggaggaggatgtgaggatgatgggcatcaacaaaacattgatgtgggagaggtagggtcctctgccttgtcagaagatagttggctttgcaaacttgctgccagtttgactttgtgcctctcacttgatctctgtgagcacttgcatagaagcccagcagagatgaagtcagagctgatcccctctacttccctcctctccatggtagcctatagggctcctcagagcacctagcatcaaataatttctttcttttttttttttttttttgagatggagtctcactctgtcgcctaggctggagtgcagtggcgcaatctcggctcactgcaagctccgcctcccaggttcacgccattctcctgcctcagcctcccaagtagctgggactacaggcgcccgtcaccacacccagctaatttttttttgtatttttagtagaaacggggtttcaccatgttagccaggatggtctcgatctcctgaccttgtgatcagcctgccttggccttccaaagtgctgggattgtaggcgtgagccaccgtgcccggccttgtcaaataatttctaaggtcctttttcagtctgacaccctgtaagtcagctagactttggtgtggggatcagagggtcctatattgggtccttcttggccttattatttctcctgcctctgttctctcctacctcagcaagatgtacagaaattttctgacaatgacaagctgtatctctaccttcagctcccctcaggaccca

SEQ ID NO: 13709 - DNA, 596 bp, Homo sapiens
attcagaaaaaggaaaataaagcaacgcacgagccggctgggccaggaccttggggctgggctggagtgaaggtggctacgagttttccagatttaggagacttcagaaaggtggggcagatagaatggagatggcaaagatctctttgggcatatatgggcctggcgaagtaatggaataatttctaattttcggagaaggcaagtgccctcatgccgggatggcagaagatgagcctgatgctaagagccccaagactgggggaagggcccccccaggtggtgctgaggctggggaacctaccacccttcttcagaggctccgaggtaccatttccaaggccgtgcagaacaaagtagaggggatcctgtagaaacggggtttcaccatgttagccaggatggtctcgatctcctgaccttgtgatcagcctgccttggccttccaaagtgctgggattgtaggcgtgagccaccgtgcccggccttgtcaaataatttctaaggtcctttttcagtctgacaccctcaagatgtacagaaattttctgacaatgacaagctgtatctctaccttcagctcccctcaggaccca

SEQ ID NO: 13710 - DNA, 2775 bp, Homo sapiens
aaccggggattgaatggagggggaagggaaggaggtgggggcgcgcctcaggatgggctgttgtgggagatgacgtaggggccggcgacgtggggagggggagcagcgggggaagtcgtggcgagattaagtaatgagaacttgggcccagttttttttccaagcctagaagggcagaatatgttcgtatcctttctgacctcccaggcatatgcaatggtgaggagtatttttgagaattagagaactttgttttgtggctgttattgttgtttttgagggggaggagggcagtatggggtcagaggcagaaatgaaaatttcttgctaacatggattcccaatccccctatctcttcctttacagttttccagatttaggagacttcagaaaggtggggcagatagaatggagatggcaaagatctctttgggcatatatgggcctggcgaagtaatggaataatttctaattttcggagaaggcaagtggtgagaaaaagaccaccggggaaattcggaggctttgtttctgtttctctgcctttctgggtaaagagatgaggagtgccctggggccttctggggaagggaaggccagtgtgagttacatctttatgcctgtccctctcaattctagccctcatgccgggatggcagaagatgagcctgatgctaagagccccaagactgggggaagggcccccccaggtggtgctgaggctggggaacctaccacccttcttcagaggctccgaggtaccatttcgtaagtactcatcacatctccaagtcctgtccaagacctgagtatagatccctgcagcacttcactttggctgtagatgaactgcctctcagcaagggcatgggagcagagggagatttttggccatggtagcaattcttgagcacctgctgggcatttcagtccttttccctccctagcagtcagataaagagacagggaaaatcttgtgtgtgacctccagctttctcctcttccccacagcaaggccgtgcagaacaaagtagaggggatcctggtaagtgtgttggggaagagggcaagagagggatggaaatgctgagggaggaggatgtgaggatgatgggcatcaacaaaacattgatgtgggagaggtagggtcctctgccttgtcagaagatagttggctttgcaaacttgctgccagtttgactttgtgcctctcacttgatctctgtgagcacttgcatagaagcccagcagagatgaagtcagagctgatcccctctacttccctcctctccatggtagcctatagggctcctcagagcacctagcatcaaataatttctttcttttttttttttttttttgagatggagtctcactctgtcgcctaggctggagtgcagtggcgcaatctcggctcactgcaagctccgcctcccaggttcacgccattctcctgcctcagcctcccaagtagctgggactacaggcgcccgtcaccacacccagctaatttttttttgtatttttagtagaaacggggtttcaccatgttagccaggatggtctcgatctcctgaccttgtgatcagcctgccttggccttccaaagtgctgggattgtaggcgtgagccaccgtgcccggccttgtcaaataatttctaaggtcctttttcagtctgacaccctgtaagtcagctagactttggtgtggggatcagagggtcctatattgggtccttcttggccttattatttctcctgcctctgttctctcctacctcagcaagatgtacagaaattttctgacaatgacaagctgtatctctaccttcagctcccctcaggacccaccactggagacaaaaggtaggtttgatagtagttttagatggcagaggttctgattcttagagaaaggttcactgggaaggggtgaggtgaataggaatactcgtaaatgctgtccttgatgaagaggaaaggtcctcgccctgacttggtttaccagggaaagttagattctgggtgaactaaatttggtccagcactactgaagtggtagtttgggaagaaccaggacaactgttagggtcttagtaatgcttgttccttttgtttctgtagctcagagccaagtacactgagcaatgaggagtacatgtatgcctataggtggatccgcaaccacctggaagagcacactgacacctgtctgccaaagcaaagtgtttatgatgcctatcggtgggtggaggggtgggtggtgggatgagtggattggtgggcataggaccccctcacccatgaagagcttcctgccttgataaagcctgccttcttaaagggttcctcacacttgatccctagggactcttcgagcctacccatggcctccttctctgagtatcttcccactctgctcccctctcactcaggaagtactgtgagagtcttgcctgttgccgcccactcagcacagccaactttggcaagatcatcagagagatcttccctgacatcaaagctcgaaggcttggtggccggggccagtccaagtatccttgactagagaggttgggggtggaggacctgggaggaagacttaggatgtggagagcaaggagtggaacagcttaacttgctcgaggggcttggagatcgccatgtgttggctgctctttaacttgcatcagatattgctacagtggcataaggaggaagaccttggtgtctatgccacccctgcctggacttgacctaaagggttctgaga

SEQ ID NO: 13711 - DNA, 903 bp, Homo sapiens
aaccggggattgaatggagggggaagggaaggaggtgggggcgcgcctcaggatgggctgttgtgggagatgacgtaggggccggcgacgtggggagggggagcagcgggggaagtcgtggcgagattaagtaatgagaacttgggcccagttttttttccaagcctagaagggcagaatatgttcgtatcctttctgacctcccaggcatatgcaatgttttccagatttaggagacttcagaaaggtggggcagatagaatggagatggcaaagatctctttgggcatatatgggcctggcgaagtaatggaataatttctaattttcggagaagccctcatgccgggatggcagaagatgagcctgatgctaagagccccaagactgggggaagggcccccccaggtggtgctgaggctggggaacctaccacccttcttcagaggctccgaggtaccatttccaaggccgtgcagaacaaagtagaggggatcctgcaagatgtacagaaattttctgacaatgacaagctgtatctctaccttcagctcccctcaggacccaccactggagacaaaagctcagagccaagtacactgagcaatgaggagtacatgtatgcctataggtggatccgcaaccacctggaagagcacactgacacctgtctgccaaagcaaagtgtttatgatgcctatcggaagtactgtgagagtcttgcctgttgccgcccactcagcacagccaactttggcaagatcatcagagagatcttccctgacatcaaagctcgaaggcttggtggccggggccagtccaaatattgctacagtggcataaggaggaagaccttggtgtctatgccacccctgcctggacttgacctaaagggttctgaga

SEQ ID NO: 13712 - DNA, 1694 bp, Homo sapiens
aacttgggcccagttttttttccaagcctagaagggcagaatatgttcgtatcctttctgacctcccaggcatatgcaatggtgaggagtatttttgagaattagagaactttgttttgtggctgttattgttgtttttgagggggaggagggcagtatggggtcagaggcagaaatgaaaatttcttgctaacatggattcccaatccccctatctcttcctttacagttttccagatttaggagacttcagaaaggtggggcagatagaatggagatggcaaagatctctttgggcatatatgggcctggcgaagtaatggaataatttctaattttcggagaaggcaagtggtgagaaaaagaccaccggggaaattcggaggctttgtttctgtttctctgcctttctgggtaaagagatgaggagtgccctggggccttctggggaagggaaggccagtgtgagttacatctttatgcctgtccctctcaattctagccctcatgccgggatggcagaagatgagcctgatgctaagagccccaagactgggggaagggcccccccaggtggtgctgaggctggggaacctaccacccttcttcagaggctccgaggtaccatttcgtaagtactcatcacatctccaagtcctgtccaagacctgagtatagatccctgcagcacttcactttggctgtagatgaactgcctctcagcaagggcatgggagcagagggagatttttggccatggtagcaattcttgagcacctgctgggcatttcagtccttttccctccctagcagtcagataaagagacagggaaaatcttgtgtgtgacctccagctttctcctcttccccacagcaaggccgtgcagaacaaagtagaggggatcctggtaagtgtgttggggaagagggcaagagagggatggaaatgctgagggaggaggatgtgaggatgatgggcatcaacaaaacattgatgtgggagaggtagggtcctctgccttgtcagaagatagttggctttgcaaacttgctgccagtttgactttgtgcctctcacttgatctctgtgagcacttgcatagaagcccagcagagatgaagtcagagctgatcccctctacttccctcctctccatggtagcctatagggctcctcagagcacctagcatcaaataatttctttcttttttttttttttttttgagatggagtctcactctgtcgcctaggctggagtgcagtggcgcaatctcggctcactgcaagctccgcctcccaggttcacgccattctcctgcctcagcctcccaagtagctgggactacaggcgcccgtcaccacacccagctaatttttttttgtatttttagtagaaacggggtttcaccatgttagccaggatggtctcgatctcctgaccttgtgatcagcctgccttggccttccaaagtgctgggattgtaggcgtgagccaccgtgcccggccttgtcaaataatttctaaggtcctttttcagtctgacaccctgtaagtcagctagactttggtgtggggatcagagggtcctatattgggtccttcttggccttattatttctcctgcctctgttctctcctacctcagcaagatgtacagaaattttctgacaatgacaagctgtatctctacct

SEQ ID NO: 13713 - DNA, 567 bp, Homo sapiens
aacttgggcccagttttttttccaagcctagaagggcagaatatgttcgtatcctttctgacctcccaggcatatgcaatgttttccagatttaggagacttcagaaaggtggggcagatagaatggagatggcaaagatctctttgggcatatatgggcctggcgaagtaatggaataatttctaattttcggagaagccctcatgccgggatggcagaagatgagcctgatgctaagagccccaagactgggggaagggcccccccaggtggtgctgaggctggggaacctaccacccttcttcagaggctccgaggtaccatttccaaggccgtgcagaacaaagtagaggggatcctgtagaaacggggtttcaccatgttagccaggatggtctcgatctcctgaccttgtgatcagcctgccttggccttccaaagtgctgggattgtaggcgtgagccaccgtgcccggccttgtcaaataatttctaaggtcctttttcagtctgacaccctcaagatgtacagaaattttctgacaatgacaagctgtatctctacct

SEQ ID NO: 13714 - DNA, 5398 bp, Homo sapiens
gcagcagtgaccaatgacagagcaggccgcccgtgtatctaggcagatcgcggctgttacaaccattcagaaaaaggaaaataaagcaacgcacgagccggctgggccaggaccttggggctgggctggagtgaaggtggctacgaggtagtttctctttctcccttacctttattgttgcttgtgttggaaggcgactgttcagaggtagggaggggcaagatgagttgggaggagagcagaaaaagattgtagctgtattttcaacagcttcttcacccatgtgcacgtgcccggaatctgggaccccattcccctgccgggtttctgacgcccagcgcatgagttccgctaccccgccccacccccgctccactttgcagaaaccggggattgaatggagggggaagggaaggaggtgggggcgcgcctcaggatgggctgttgtgggagatgacgtaggggccggcgacgtggggagggggagcagcgggggaagtcgtggcgagattaagtaatgagaacttgggcccagttttttttccaagcctagaagggcagaatatgttcgtatcctttctgacctcccaggcatatgcaatggtgaggagtatttttgagaattagagaactttgttttgtggctgttattgttgtttttgagggggaggagggcagtatggggtcagaggcagaaatgaaaatttcttgctaacatggattcccaatccccctatctcttcctttacagttttccagatttaggagacttcagaaaggtggggcagatagaatggagatggcaaagatctctttgggcatatatgggcctggcgaagtaatggaataatttctaattttcggagaaggcaagtggtgagaaaaagaccaccggggaaattcggaggctttgtttctgtttctctgcctttctgggtaaagagatgaggagtgccctggggccttctggggaagggaaggccagtgtgagttacatctttatgcctgtccctctcaattctagccctcatgccgggatggcagaagatgagcctgatgctaagagccccaagactgggggaagggcccccccaggtggtgctgaggctggggaacctaccacccttcttcagaggctccgaggtaccatttcgtaagtactcatcacatctccaagtcctgtccaagacctgagtatagatccctgcagcacttcactttggctgtagatgaactgcctctcagcaagggcatgggagcagagggagatttttggccatggtagcaattcttgagcacctgctgggcatttcagtccttttccctccctagcagtcagataaagagacagggaaaatcttgtgtgtgacctccagctttctcctcttccccacagcaaggccgtgcagaacaaagtagaggggatcctggtaagtgtgttggggaagagggcaagagagggatggaaatgctgagggaggaggatgtgaggatgatgggcatcaacaaaacattgatgtgggagaggtagggtcctctgccttgtcagaagatagttggctttgcaaacttgctgccagtttgactttgtgcctctcacttgatctctgtgagcacttgcatagaagcccagcagagatgaagtcagagctgatcccctctacttccctcctctccatggtagcctatagggctcctcagagcacctagcatcaaataatttctttcttttttttttttttttttgagatggagtctcactctgtcgcctaggctggagtgcagtggcgcaatctcggctcactgcaagctccgcctcccaggttcacgccattctcctgcctcagcctcccaagtagctgggactacaggcgcccgtcaccacacccagctaatttttttttgtatttttagtagaaacggggtttcaccatgttagccaggatggtctcgatctcctgaccttgtgatcagcctgccttggccttccaaagtgctgggattgtaggcgtgagccaccgtgcccggccttgtcaaataatttctaaggtcctttttcagtctgacaccctgtaagtcagctagactttggtgtggggatcagagggtcctatattgggtccttcttggccttattatttctcctgcctctgttctctcctacctcagcaagatgtacagaaattttctgacaatgacaagctgtatctctaccttcagctcccctcaggacccaccactggagacaaaaggtaggtttgatagtagttttagatggcagaggttctgattcttagagaaaggttcactgggaaggggtgaggtgaataggaatactcgtaaatgctgtccttgatgaagaggaaaggtcctcgccctgacttggtttaccagggaaagttagattctgggtgaactaaatttggtccagcactactgaagtggtagtttgggaagaaccaggacaactgttagggtcttagtaatgcttgttccttttgtttctgtagctcagagccaagtacactgagcaatgaggagtacatgtatgcctataggtggatccgcaaccacctggaagagcacactgacacctgtctgccaaagcaaagtgtttatgatgcctatcggtgggtggaggggtgggtggtgggatgagtggattggtgggcataggaccccctcacccatgaagagcttcctgccttgataaagcctgccttcttaaagggttcctcacacttgatccctagggactcttcgagcctacccatggcctccttctctgagtatcttcccactctgctcccctctcactcaggaagtactgtgagagtcttgcctgttgccgcccactcagcacagccaactttggcaagatcatcagagagatcttccctgacatcaaagctcgaaggcttggtggccggggccagtccaagtatccttgactagagaggttgggggtggaggacctgggaggaagacttaggatgtggagagcaaggagtggaacagcttaacttgctcgaggggcttggagatcgccatgtgttggctgctctttaacttgcatcagatattgctacagtggcataaggaggaagaccttggtgtctatgccacccctgcctggacttgacctaaagggttctgagagtgtaagtaccaaatcaccttccaattccactcttctctcccaggtaaaagtcagaggtctttggggcatgttttgagggctaacagcctcagtcattatgtacatagcttctaggtatgatgttcccttctgccaaccctgtagctgaggcagaggatgaagagaacttgtgggcttctgcaatgggataggtagaggctactcccatccccagtctggtctcagctttggtcaatagtctttgatctctgacaagagaggaggcaagggttctttaatttggagtgtgattgggcatgtccttccccacttcagccagaaatgggcccagaagtaaccccagcacctcgagatgaactggtggaggcagcgtgtgccctgacctgtgactgggcagagcggatcctgaaacggtccttcagttccatcgttgaggtcgcccgcttcctgctacagcagcatctcatctctgcccgatctgcacatgcccatgtgcttaaggccatggggctcgctggtgtgttgaccctctcttatgtctcagcaaccctgagccactttcagcttcagtggccctcccacacactagaatagagacaccttggatttgccccctcttcctggagacccttctaagacatgctttagcaccccatttcctgtctctaccagtcagtcaatcagaattgcctcactcccctattcctcagtttcctcctcaccttcactctattacctttttggtacctctgcagaagaggacgaacatgcacctcgggaacggtcatctaaaccaaagaatggtttagagaacccagagggtggagcccacaagaagccagagagactggcccaggtaaggaagtcagtggccctgactttgctgtcctgggctgggggcttagtatatccttctccaattgggtcccttgcttttccacctcctgtgcctctggcgtctatgtttcccccaatactcattcttcacaccttactgtgttcctctctttactttttagcctcctaaggatctggaagcccgaactggggccggtcctctcgcacgtggagagcggaagaagagtgtagttgagagctcggccccaggagccaataacctgcaggttaatgccctagtggctcggctgcctctgctccttccccgggcccctcgctcactaattccgccaatcccagtctctccacctattctggcccccaggctttcttcaggtgccctgaaagtggctacactgcctctgtctagtagggccggggcacccccagcagctgtgcccatcattaacatgatcttaccaactgttcctgctttgcctggacctggacctgggcctgggcgagctccacctgggggactcactcagccccggggcacagagaacagagaggtaggcataggtggtgaccaaggaccacatgacaagggtgtcaagaggacagctgaagtacctgtgagtgaggccagtgggcaggctccaccagctaaagcagcaaagcaggatatagaggatacagcaagtgatgccaaaaggaaacgggggcgccctcgaaaaaagtcaggtggaagtggggaaaggaattctacccctctcaagtcagcagctgccatggaatctgcccagtcctcaaggttaccatgggagacatggggctcaggaggggaaggcaactcagctggaggggcagagaggccagggccaatgggagaggctgaaaagggggcagtacttgcccagggtcagggagatggtactgtttccaaaggaggaaggggccccggttcccagcataccaaagaagcagaagataaaattcccttggtcccctcaaaagtgagtgtcatcaagggcagcagaagccaaaaggaggcttttcctttggcaaagggagaggtagacactgcaccacagggtaataaagacttaaaggagcatgtgcttcaaagttccttatcccaggagcataaagacccaaaagcaacacccccatgatacaggtctgtggggaagagtgtttatatccctacgttaactttgcctagtagaggcccttctttgcacttgcttctcatttggctattcttttcctaaggaagtccattctcctctgtacagacagctgagtcacccagtctacttagtacctggttgctgcctctgaccttttcagcttgataccctgggctttagtgtaaccaataaatctgtagtgacctta

SEQ ID NO: 13715 - DNA, 2355 bp, Homo sapiens
gcagcagtgaccaatgacagagcaggccgcccgtgtatctaggcagatcgcggctgttacaaccattcagaaaaaggaaaataaagcaacgcacgagccggctgggccaggaccttggggctgggctggagtgaaggtggctacgagttttccagatttaggagacttcagaaaggtggggcagatagaatggagatggcaaagatctctttgggcatatatgggcctggcgaagtaatggaataatttctaattttcggagaagccctcatgccgggatggcagaagatgagcctgatgctaagagccccaagactgggggaagggcccccccaggtggtgctgaggctggggaacctaccacccttcttcagaggctccgaggtaccatttccaaggccgtgcagaacaaagtagaggggatcctgcaagatgtacagaaattttctgacaatgacaagctgtatctctaccttcagctcccctcaggacccaccactggagacaaaagctcagagccaagtacactgagcaatgaggagtacatgtatgcctataggtggatccgcaaccacctggaagagcacactgacacctgtctgccaaagcaaagtgtttatgatgcctatcggaagtactgtgagagtcttgcctgttgccgcccactcagcacagccaactttggcaagatcatcagagagatcttccctgacatcaaagctcgaaggcttggtggccggggccagtccaaatattgctacagtggcataaggaggaagaccttggtgtctatgccacccctgcctggacttgacctaaagggttctgagagtccagaaatgggcccagaagtaaccccagcacctcgagatgaactggtggaggcagcgtgtgccctgacctgtgactgggcagagcggatcctgaaacggtccttcagttccatcgttgaggtcgcccgcttcctgctacagcagcatctcatctctgcccgatctgcacatgcccatgtgcttaaggccatggggctcgctgaagaggacgaacatgcacctcgggaacggtcatctaaaccaaagaatggtttagagaacccagagggtggagcccacaagaagccagagagactggcccagcctcctaaggatctggaagcccgaactggggccggtcctctcgcacgtggagagcggaagaagagtgtagttgagagctcggccccaggagccaataacctgcaggttaatgccctagtggctcggctgcctctgctccttccccgggcccctcgctcactaattccgccaatcccagtctctccacctattctggcccccaggctttcttcaggtgccctgaaagtggctacactgcctctgtctagtagggccggggcacccccagcagctgtgcccatcattaacatgatcttaccaactgttcctgctttgcctggacctggacctgggcctgggcgagctccacctgggggactcactcagccccggggcacagagaacagagaggtaggcataggtggtgaccaaggaccacatgacaagggtgtcaagaggacagctgaagtacctgtgagtgaggccagtgggcaggctccaccagctaaagcagcaaagcaggatatagaggatacagcaagtgatgccaaaaggaaacgggggcgccctcgaaaaaagtcaggtggaagtggggaaaggaattctacccctctcaagtcagcagctgccatggaatctgcccagtcctcaaggttaccatgggagacatggggctcaggaggggaaggcaactcagctggaggggcagagaggccagggccaatgggagaggctgaaaagggggcagtacttgcccagggtcagggagatggtactgtttccaaaggaggaaggggccccggttcccagcataccaaagaagcagaagataaaattcccttggtcccctcaaaagtgagtgtcatcaagggcagcagaagccaaaaggaggcttttcctttggcaaagggagaggtagacactgcaccacagggtaataaagacttaaaggagcatgtgcttcaaagttccttatcccaggagcataaagacccaaaagcaacacccccatgatacaggtctgtggggaagagtgtttatatccctacgttaactttgcctagtagaggcccttctttgcacttgcttctcatttggctattcttttcctaaggaagtccattctcctctgtacagacagctgagtcacccagtctacttagtacctggttgctgcctctgaccttttcagcttgataccctgggctttagtgtaaccaataaatctgtagtgacctta

SEQ ID NO: 13716 - DNA, 2351 bp, Homo sapiens
ttttccagatttaggagacttcagaaaggtggggcagatagaatggagatggcaaagatctctttgggcatatatgggcctggcgaagtaatggaataatttctaattttcggagaaggcaagtggtgagaaaaagaccaccggggaaattcggaggctttgtttctgtttctctgcctttctgggtaaagagatgaggagtgccctggggccttctggggaagggaaggccagtgtgagttacatctttatgcctgtccctctcaattctagccctcatgccgggatggcagaagatgagcctgatgctaagagccccaagactgggggaagggcccccccaggtggtgctgaggctggggaacctaccacccttcttcagaggctccgaggtaccatttcgtaagtactcatcacatctccaagtcctgtccaagacctgagtatagatccctgcagcacttcactttggctgtagatgaactgcctctcagcaagggcatgggagcagagggagatttttggccatggtagcaattcttgagcacctgctgggcatttcagtccttttccctccctagcagtcagataaagagacagggaaaatcttgtgtgtgacctccagctttctcctcttccccacagcaaggccgtgcagaacaaagtagaggggatcctggtaagtgtgttggggaagagggcaagagagggatggaaatgctgagggaggaggatgtgaggatgatgggcatcaacaaaacattgatgtgggagaggtagggtcctctgccttgtcagaagatagttggctttgcaaacttgctgccagtttgactttgtgcctctcacttgatctctgtgagcacttgcatagaagcccagcagagatgaagtcagagctgatcccctctacttccctcctctccatggtagcctatagggctcctcagagcacctagcatcaaataatttctttcttttttttttttttttttgagatggagtctcactctgtcgcctaggctggagtgcagtggcgcaatctcggctcactgcaagctccgcctcccaggttcacgccattctcctgcctcagcctcccaagtagctgggactacaggcgcccgtcaccacacccagctaatttttttttgtatttttagtagaaacggggtttcaccatgttagccaggatggtctcgatctcctgaccttgtgatcagcctgccttggccttccaaagtgctgggattgtaggcgtgagccaccgtgcccggccttgtcaaataatttctaaggtcctttttcagtctgacaccctgtaagtcagctagactttggtgtggggatcagagggtcctatattgggtccttcttggccttattatttctcctgcctctgttctctcctacctcagcaagatgtacagaaattttctgacaatgacaagctgtatctctaccttcagctcccctcaggacccaccactggagacaaaaggtaggtttgatagtagttttagatggcagaggttctgattcttagagaaaggttcactgggaaggggtgaggtgaataggaatactcgtaaatgctgtccttgatgaagaggaaaggtcctcgccctgacttggtttaccagggaaagttagattctgggtgaactaaatttggtccagcactactgaagtggtagtttgggaagaaccaggacaactgttagggtcttagtaatgcttgttccttttgtttctgtagctcagagccaagtacactgagcaatgaggagtacatgtatgcctataggtggatccgcaaccacctggaagagcacactgacacctgtctgccaaagcaaagtgtttatgatgcctatcggtgggtggaggggtgggtggtgggatgagtggattggtgggcataggaccccctcacccatgaagagcttcctgccttgataaagcctgccttcttaaagggttcctcacacttgatccctagggactcttcgagcctacccatggcctccttctctgagtatcttcccactctgctcccctctcactcaggaagtactgtgagagtcttgcctgttgccgcccactcagcacagccaactttggcaagatcatcagagagatcttccctgacatcaaagctcgaaggcttggtggccggggccagtccaagtatccttgactagagaggttgggggtggaggacctgggaggaagacttaggatgtggagagcaaggagtggaacagcttaacttgctcgaggggcttggagatcgccatgtgttggctgctctttaacttgcatcagatattgctacagtggcataagga

SEQ ID NO: 13717 - DNA, 537 bp, Homo sapiens
ttttccagatttaggagacttcagaaagccctcatgccgggatggcagaagatgagcctgatgctaagagccccaagactgggggaagggcccccccaggtggtgctgaggctggggaacctaccacccttcttcagaggctccgaggtaccatttccaaggccgtgcagaacaaagtagaggggatcctgcaagatgtacagaaattttctgacaatgacaagctgtatctctaccttcagctcccctcaggacccaccactggagacaaaagctcagagccaagtacactgagcaatgaggagtacatgtatgcctataggtggatccgcaaccacctggaagagcacactgacacctgtctgccaaagcaaagtgtttatgatgcctatcggaagtactgtgagagtcttgcctgttgccgcccactcagcacagccaactttggcaagatcatcagagagatcttccctgacatcaaagctcgaaggcttggtggccggggccagtccaaatattgctacagtggcataagga

SEQ ID NO: 13718 - DNA, 845 bp, Homo sapiens
gaaattttctgacaatgacaagctgtatctctaccttcagctcccctcaggacccaccactggagacaaaaggtaggtttgatagtagttttagatggcagaggttctgattcttagagaaaggttcactgggaaggggtgaggtgaataggaatactcgtaaatgctgtccttgatgaagaggaaaggtcctcgccctgacttggtttaccagggaaagttagattctgggtgaactaaatttggtccagcactactgaagtggtagtttgggaagaaccaggacaactgttagggtcttagtaatgcttgttccttttgtttctgtagctcagagccaagtacactgagcaatgaggagtacatgtatgcctataggtggatccgcaaccacctggaagagcacactgacacctgtctgccaaagcaaagtgtttatgatgcctatcggtgggtggaggggtgggtggtgggatgagtggattggtgggcataggaccccctcacccatgaagagcttcctgccttgataaagcctgccttcttaaagggttcctcacacttgatccctagggactcttcgagcctacccatggcctccttctctgagtatcttcccactctgctcccctctcactcaggaagtactgtgagagtcttgcctgttgccgcccactcagcacagccaactttggcaagatcatcagagagatcttccctgacatcaaagctcgaaggcttggtggccggggccagtccaagtatccttgactagagaggttgggggtggaggacctgggaggaagacttaggatgtggagagcaaggagtggaacagcttaact

SEQ ID NO: 13719 - DNA, 396 bp, Homo sapiens
gaaattttctgacaatgacaagctgtatctctaccttcagctcccctcaggacccaccactggagacaaaagctcagagccaagtacactgagcaatgaggagtacatgtatgcctataggtggatccgcaaccacctggaagagcacactgacacctgtctgccaaagcaaagtgtttatgatgcctatcggaagtactgtgagagtcttgcctgttgccgcccactcagcacagccaactttggcaagatcatcagagagatcttccctgacatcaaagctcgaaggcttggtggccggggccagtccaagtatccttgactagagaggttgggggtggaggacctgggaggaagacttaggatgtggagagcaaggagtggaacagcttaact

SEQ ID NO: 13720 - DNA, 971 bp, Homo sapiens
tgaagagcttcctgccttgataaagcctgccttcttaaagggttcctcacacttgatccctagggactcttcgagcctacccatggcctccttctctgagtatcttcccactctgctcccctctcactcaggaagtactgtgagagtcttgcctgttgccgcccactcagcacagccaactttggcaagatcatcagagagatcttccctgacatcaaagctcgaaggcttggtggccggggccagtccaagtatccttgactagagaggttgggggtggaggacctgggaggaagacttaggatgtggagagcaaggagtggaacagcttaacttgctcgaggggcttggagatcgccatgtgttggctgctctttaacttgcatcagatattgctacagtggcataaggaggaagaccttggtgtctatgccacccctgcctggacttgacctaaagggttctgagagtgtaagtaccaaatcaccttccaattccactcttctctcccaggtaaaagtcagaggtctttggggcatgttttgagggctaacagcctcagtcattatgtacatagcttctaggtatgatgttcccttctgccaaccctgtagctgaggcagaggatgaagagaacttgtgggcttctgcaatgggataggtagaggctactcccatccccagtctggtctcagctttggtcaatagtctttgatctctgacaagagaggaggcaagggttctttaatttggagtgtgattgggcatgtccttccccacttcagccagaaatgggcccagaagtaaccccagcacctcgagatgaactggtggaggcagcgtgtgccctgacctgtgactgggcagagcggatcctgaaacggtccttcagttccatcgttgaggtcgcccgcttcctgctacagcagcatctcatctctgcccgatctgcacatgcccatgtgcttaag

SEQ ID NO: 13721 - DNA, 519 bp, Homo sapiens
tgaagagcttcctgccttgataaagcctgccttcttaaagggttcctcacacttgatccctagggactcttcgagcctacccatggcctccttctctgagtatcttcccactctgctcccctctcactcaggaagtactgtgagagtcttgcctgttgccgcccactcagcacagccaactttggcaagatcatcagagagatcttccctgacatcaaagctcgaaggcttggtggccggggccagtccaaatattgctacagtggcataaggaggaagaccttggtgtctatgccacccctgcctggacttgacctaaagggttctgagagtccagaaatgggcccagaagtaaccccagcacctcgagatgaactggtggaggcagcgtgtgccctgacctgtgactgggcagagcggatcctgaaacggtccttcagttccatcgttgaggtcgcccgcttcctgctacagcagcatctcatctctgcccgatctgcacatgcccatgtgcttaag

SEQ ID NO: 13722 - DNA, 2665 bp, Homo sapiens
ggggctgggctggagtgaaggtggctacgaggtagtttctctttctcccttacctttattgttgcttgtgttggaaggcgactgttcagaggtagggaggggcaagatgagttgggaggagagcagaaaaagattgtagctgtattttcaacagcttcttcacccatgtgcacgtgcccggaatctgggaccccattcccctgccgggtttctgacgcccagcgcatgagttccgctaccccgccccacccccgctccactttgcagaaaccggggattgaatggagggggaagggaaggaggtgggggcgcgcctcaggatgggctgttgtgggagatgacgtaggggccggcgacgtggggagggggagcagcgggggaagtcgtggcgagattaagtaatgagaacttgggcccagttttttttccaagcctagaagggcagaatatgttcgtatcctttctgacctcccaggcatatgcaatggtgaggagtatttttgagaattagagaactttgttttgtggctgttattgttgtttttgagggggaggagggcagtatggggtcagaggcagaaatgaaaatttcttgctaacatggattcccaatccccctatctcttcctttacagttttccagatttaggagacttcagaaaggtggggcagatagaatggagatggcaaagatctctttgggcatatatgggcctggcgaagtaatggaataatttctaattttcggagaaggcaagtggtgagaaaaagaccaccggggaaattcggaggctttgtttctgtttctctgcctttctgggtaaagagatgaggagtgccctggggccttctggggaagggaaggccagtgtgagttacatctttatgcctgtccctctcaattctagccctcatgccgggatggcagaagatgagcctgatgctaagagccccaagactgggggaagggcccccccaggtggtgctgaggctggggaacctaccacccttcttcagaggctccgaggtaccatttcgtaagtactcatcacatctccaagtcctgtccaagacctgagtatagatccctgcagcacttcactttggctgtagatgaactgcctctcagcaagggcatgggagcagagggagatttttggccatggtagcaattcttgagcacctgctgggcatttcagtccttttccctccctagcagtcagataaagagacagggaaaatcttgtgtgtgacctccagctttctcctcttccccacagcaaggccgtgcagaacaaagtagaggggatcctggtaagtgtgttggggaagagggcaagagagggatggaaatgctgagggaggaggatgtgaggatgatgggcatcaacaaaacattgatgtgggagaggtagggtcctctgccttgtcagaagatagttggctttgcaaacttgctgccagtttgactttgtgcctctcacttgatctctgtgagcacttgcatagaagcccagcagagatgaagtcagagctgatcccctctacttccctcctctccatggtagcctatagggctcctcagagcacctagcatcaaataatttctttcttttttttttttttttttgagatggagtctcactctgtcgcctaggctggagtgcagtggcgcaatctcggctcactgcaagctccgcctcccaggttcacgccattctcctgcctcagcctcccaagtagctgggactacaggcgcccgtcaccacacccagctaatttttttttgtatttttagtagaaacggggtttcaccatgttagccaggatggtctcgatctcctgaccttgtgatcagcctgccttggccttccaaagtgctgggattgtaggcgtgagccaccgtgcccggccttgtcaaataatttctaaggtcctttttcagtctgacaccctgtaagtcagctagactttggtgtggggatcagagggtcctatattgggtccttcttggccttattatttctcctgcctctgttctctcctacctcagcaagatgtacagaaattttctgacaatgacaagctgtatctctaccttcagctcccctcaggacccaccactggagacaaaaggtaggtttgatagtagttttagatggcagaggttctgattcttagagaaaggttcactgggaaggggtgaggtgaataggaatactcgtaaatgctgtccttgatgaagaggaaaggtcctcgccctgacttggtttaccagggaaagttagattctgggtgaactaaatttggtccagcactactgaagtggtagtttgggaagaaccaggacaactgttagggtcttagtaatgcttgttccttttgtttctgtagctcagagccaagtacactgagcaatgaggagtacatgtatgcctataggtggatccgcaaccacctggaagagcacactgacacctgtctgccaaagcaaagtgtttatgatgcctatcggtgggtggaggggtgggtggtgggatgagtggattggtgggcataggaccccctcacccatgaagagcttcctgccttgataaagcctgccttcttaaagggttcctcacacttgatccctagggactcttcgagcctacccatggcctcc

SEQ ID NO: 13723 - DNA, 555 bp, Homo sapiens
ggggctgggctggagtgaaggtggctacgaggcatatgcaatgttttccagatttaggagacttcagaaaggtggggcagatagaatggagatggcaaagatctctttgggcatatatgggcctggcgaagtaatggaataatttctaattttcggagaagccctcatgccgggatggcagaagatgagcctgatgctaagagccccaagactgggggaagggcccccccaggtggtgctgaggctggggaacctaccacccttcttcagaggctccgaggtaccatttccaaggccgtgcagaacaaagtagaggggatcctgcaagatgtacagaaattttctgacaatgacaagctgtatctctaccttcagctcccctcaggacccaccactggagacaaaagctcagagccaagtacactgagcaatgaggagtacatgtatgcctataggtggatccgcaaccacctggaagagcacactgacacctgtctgccaaagcaaagtgtttatgatgcctatcgggactcttcgagcctacccatggcctcc

SEQ ID NO: 13724 - DNA, 1868 bp, Homo sapiens
gtggcgagattaagtaatgagaacttgggcccagttttttttccaagcctagaagggcagaatatgttcgtatcctttctgacctcccaggcatatgcaatggtgaggagtatttttgagaattagagaactttgttttgtggctgttattgttgtttttgagggggaggagggcagtatggggtcagaggcagaaatgaaaatttcttgctaacatggattcccaatccccctatctcttcctttacagttttccagatttaggagacttcagaaaggtggggcagatagaatggagatggcaaagatctctttgggcatatatgggcctggcgaagtaatggaataatttctaattttcggagaaggcaagtggtgagaaaaagaccaccggggaaattcggaggctttgtttctgtttctctgcctttctgggtaaagagatgaggagtgccctggggccttctggggaagggaaggccagtgtgagttacatctttatgcctgtccctctcaattctagccctcatgccgggatggcagaagatgagcctgatgctaagagccccaagactgggggaagggcccccccaggtggtgctgaggctggggaacctaccacccttcttcagaggctccgaggtaccatttcgtaagtactcatcacatctccaagtcctgtccaagacctgagtatagatccctgcagcacttcactttggctgtagatgaactgcctctcagcaagggcatgggagcagagggagatttttggccatggtagcaattcttgagcacctgctgggcatttcagtccttttccctccctagcagtcagataaagagacagggaaaatcttgtgtgtgacctccagctttctcctcttccccacagcaaggccgtgcagaacaaagtagaggggatcctggtaagtgtgttggggaagagggcaagagagggatggaaatgctgagggaggaggatgtgaggatgatgggcatcaacaaaacattgatgtgggagaggtagggtcctctgccttgtcagaagatagttggctttgcaaacttgctgccagtttgactttgtgcctctcacttgatctctgtgagcacttgcatagaagcccagcagagatgaagtcagagctgatcccctctacttccctcctctccatggtagcctatagggctcctcagagcacctagcatcaaataatttctttcttttttttttttttttttgagatggagtctcactctgtcgcctaggctggagtgcagtggcgcaatctcggctcactgcaagctccgcctcccaggttcacgccattctcctgcctcagcctcccaagtagctgggactacaggcgcccgtcaccacacccagctaatttttttttgtatttttagtagaaacggggtttcaccatgttagccaggatggtctcgatctcctgaccttgtgatcagcctgccttggccttccaaagtgctgggattgtaggcgtgagccaccgtgcccggccttgtcaaataatttctaaggtcctttttcagtctgacaccctgtaagtcagctagactttggtgtggggatcagagggtcctatattgggtccttcttggccttattatttctcctgcctctgttctctcctacctcagcaagatgtacagaaattttctgacaatgacaagctgtatctctaccttcagctcccctcaggacccaccactggagacaaaaggtaggtttgatagtagttttagatggcagaggttctgattcttagagaaaggttcactgggaaggggtgaggtgaataggaatactcgtaaatgctgtccttgatgaagaggaaagg

SEQ ID NO: 13725 - DNA, 583 bp, Homo sapiens
gtggcgagattaagtaatgagaacttgggcccagttttttttccaagcctagaagggcagaatatgttcgtatcctttctgacctcccaggcatatgcaatgttttccagatttaggagacttcagaaaggtggggcagatagaatggagatggcaaagatctctttgggcatatatgggcctggcgaagtaatggaataatttctaattttcggagaagccctcatgccgggatggcagaagatgagcctgatgctaagagccccaagactgggggaagggcccccccaggtggtgctgaggctggggaacctaccacccttcttcagaggctccgaggtaccatttccaaggccgtgcagaacaaagtagaggggatcctgcaagatgtacagaaattttctgacaatgacaagctgtatctctaccttcagctcccctcaggacccaccactggagacaaaaggtaggtttgatagtagttttagatggcagaggttctgattcttagagaaaggttcactgggaaggggtgaggtgaataggaatactcgtaaatgctgtccttgatgaagaggaaagg

SEQ ID NO: 13726 - DNA, 2333 bp, Homo sapiens
cattcagaaaaaggaaaataaagcaacgcacgagccggctgggccaggaccttggggctgggctggagtgaaggtggctacgaggtagtttctctttctcccttacctttattgttgcttgtgttggaaggcgactgttcagaggtagggaggggcaagatgagttgggaggagagcagaaaaagattgtagctgtattttcaacagcttcttcacccatgtgcacgtgcccggaatctgggaccccattcccctgccgggtttctgacgcccagcgcatgagttccgctaccccgccccacccccgctccactttgcagaaaccggggattgaatggagggggaagggaaggaggtgggggcgcgcctcaggatgggctgttgtgggagatgacgtaggggccggcgacgtggggagggggagcagcgggggaagtcgtggcgagattaagtaatgagaacttgggcccagttttttttccaagcctagaagggcagaatatgttcgtatcctttctgacctcccaggcatatgcaatggtgaggagtatttttgagaattagagaactttgttttgtggctgttattgttgtttttgagggggaggagggcagtatggggtcagaggcagaaatgaaaatttcttgctaacatggattcccaatccccctatctcttcctttacagttttccagatttaggagacttcagaaaggtggggcagatagaatggagatggcaaagatctctttgggcatatatgggcctggcgaagtaatggaataatttctaattttcggagaaggcaagtggtgagaaaaagaccaccggggaaattcggaggctttgtttctgtttctctgcctttctgggtaaagagatgaggagtgccctggggccttctggggaagggaaggccagtgtgagttacatctttatgcctgtccctctcaattctagccctcatgccgggatggcagaagatgagcctgatgctaagagccccaagactgggggaagggcccccccaggtggtgctgaggctggggaacctaccacccttcttcagaggctccgaggtaccatttcgtaagtactcatcacatctccaagtcctgtccaagacctgagtatagatccctgcagcacttcactttggctgtagatgaactgcctctcagcaagggcatgggagcagagggagatttttggccatggtagcaattcttgagcacctgctgggcatttcagtccttttccctccctagcagtcagataaagagacagggaaaatcttgtgtgtgacctccagctttctcctcttccccacagcaaggccgtgcagaacaaagtagaggggatcctggtaagtgtgttggggaagagggcaagagagggatggaaatgctgagggaggaggatgtgaggatgatgggcatcaacaaaacattgatgtgggagaggtagggtcctctgccttgtcagaagatagttggctttgcaaacttgctgccagtttgactttgtgcctctcacttgatctctgtgagcacttgcatagaagcccagcagagatgaagtcagagctgatcccctctacttccctcctctccatggtagcctatagggctcctcagagcacctagcatcaaataatttctttcttttttttttttttttttgagatggagtctcactctgtcgcctaggctggagtgcagtggcgcaatctcggctcactgcaagctccgcctcccaggttcacgccattctcctgcctcagcctcccaagtagctgggactacaggcgcccgtcaccacacccagctaatttttttttgtatttttagtagaaacggggtttcaccatgttagccaggatggtctcgatctcctgaccttgtgatcagcctgccttggccttccaaagtgctgggattgtaggcgtgagccaccgtgcccggccttgtcaaataatttctaaggtcctttttcagtctgacaccctgtaagtcagctagactttggtgtggggatcagagggtcctatattgggtccttcttggccttattatttctcctgcctctgttctctcctacctcagcaagatgtacagaaattttctgacaatgacaagctgtatctctaccttcagctcccctcaggacccaccactggagacaaaaggtaggtttgatagtagttttagatggcagaggttctgattcttagagaaaggttcactgggaaggggtgaggtgaataggaatactcgtaaatgctgtccttgatgaagaggaaaggtcctcgccctgacttggtttaccaggg

SEQ ID NO: 13727 - DNA, 588 bp, Homo sapiens
cattcagaaaaaggaaaataaagcaacgcacgagccggctgggccaggaccttggggctgggctggagtgaaggtggctacgagttttccagatttaggagacttcagaaaggtggggcagatagaatggagatggcaaagatctctttgggcatatatgggcctggcgaagtaatggaataatttctaattttcggagaagccctcatgccgggatggcagaagatgagcctgatgctaagagccccaagactgggggaagggcccccccaggtggtgctgaggctggggaacctaccacccttcttcagaggctccgaggtaccatttcgccgtgcagaacaaagtagaggggatcctgcaagatgtacagaaattttctgacaatgacaagctgtatctctaccttcagctcccctcaggacccaccactggagacaaaaggtaggtttgatagtagttttagatggcagaggttctgattcttagagaaaggttcactgggaaggggtgaggtgaataggaatactcgtaaatgctgtccttgatgaagaggaaaggtcctcgccctgacttggtttaccaggg

SEQ ID NO: 13728 - DNA, 3582 bp, Homo sapiens
gccgctcgcaggcgccgcacggagttgcgtcccggggacttggggccgcagggagctgtgagtacccaggaagctgcaccgtgtggcctggagctgtctatctgtccttccagccacctgtctgtccagccacccttccacagactgaggcttgacaccggagcatctgtacagagcaaggagaagacaagaacatgctctaaagcccttcacagcaagacccaggaagccgcgggcaaactcagactcgaagccctcccgcctcctgcccacaatggcctctgctgacaagaatggcgggagcgtgtcctctgtgtccagcagccgcctgcagagccggaagccacccaacctctccatcaccatcccgccacccgagaaagagacccaggcccctggcgagcaggacagcatgctgcctgagggttttcagaataggaggctaaagaaaagccagcccaggacctgggctgcacacaccaccgcctgccctccctccttcctccccaagaggaagaacccagcctacttgaagagcgtcagcctccaggagccacgcagccgatggcaggagagttcagagaagcgccctggcttccgccgccaggcctcactgtcccagagcatccgcaagggcgcagcccagtggtttggagtcagcggcgactgggaggggcagcggcagcagtggcagcgccgcagcctgcaccactgcagcatgcgctacggccgcctgaaggcctcgtgccagcgtgacctggagctccccagccaggaggcaccgtccttccagggcactgagtccccaaagccctgcaagatgcccaagattgtggatccgctggcccggggccgggccttccgccacccggaggagatggacaggccccacgccccgcacccaccgctgacccccggagtcctgtccctcacctccttcaccagtgtccgttctggctactcccacctgccacgccgcaagagaatgtctgtggcccacatgagcttgcaagctgccgctgccctcctcaaggggcgctcggtgctggatgccaccggacagcggtgccgggtggtcaagcgcagctttgccttcccgagcttcctggaggaggatgtggtcgatggggcagacacgtttgactcctccttttttagtaaggaagaaatgagctccatgcctgatgatgtctttgagtcccccccactctctgccagctacttccgagggatcccacactcagcctcccctgtctcccccgatggggtgcaaatccctctgaaggagtatggccgagccccagtccccgggccccggcgcggcaagcgcatcgcctccaaggtgaagcactttgcctttgatcggaagaagcggcactacggcctcggcgtggtgggcaactggctgaaccgcagctaccgccgcagcatcagcagcactgtgcagcggcagctggagagcttcgacagccaccggccctacttcacctactggctgaccttcgtccatgtcatcatcacgctgctggtgatttgcacgtatggcatcgcacccgtgggctttgcccagcacgtcaccacccagctggtgctgcggaacaaaggtgtgtacgagagcgtgaagtacatccagcaggagaacttctgggttggccccagctcgattgacctgatccacctgggggccaagttctcaccctgcatccggaaggacgggcagatcgagcagctggtgctgcgcgagcgagacctggagcgggactcaggctgctgtgtccagaatgaccactccggatgcatccagacccagcggaaggactgctcggagactttggccacttttgtcaagtggcaggatgacactgggccccccatggacaagtctgatctgggccagaagcggacttcgggggctgtctgccaccaggaccccaggacctgcgaggagccagcctccagcggtgcccacatctggcccgatgacatcactaagtggccgatctgcacagagcaggccaggagcaaccacacaggcttcctgcacatggactgcgagatcaagggccgcccctgctgcatcggcaccaagggcagctgtgagatcaccacccgggaatactgtgagttcatgcacggctatttccatgaggaagcaacactctgctcccaggtgcactgcttggacaaggtgtgtgggctgctgcccttcctcaaccctgaggtcccagatcagttctacaggctctggctgtctctcttcctacatgctggcgtggtgcactgcctcgtgtctgtggtctttcaaatgaccatcctgagggacctggagaagctggccggctggcaccgtatcgccatcatcttcatcctcagtggcatcacaggcaacctcgccagtgccatctttctcccataccgggcagaggtgggcccggccggctcacagttcggcctcctcgcctgcctcttcgtggagctcttccagagctggccgctgctggagaggccctggaaggccttcctcaacctctcggccatcgtgctcttcctgttcatctgtggcctcctgccctggatcgacaacatcgcccacatcttcggcttcctcagtggcctgctgctggccttcgccttcctgccctacatcaccttcggcaccagcgacaagtaccgcaagcgggcactcatcctggtgtcactgctggcctttgccggcctcttcgccgccctcgtgctgtggctgtacatctaccccattaactggccctggatcgagcacctcacctgcttccccttcaccagccgcttctgcgagaagtatgagctggaccaggtgctgcactgaccgctgggccacacggctgcccctcagccctgctggaacagggtctgcctgcgagggctgccctctgcagagcgctctctgtgtgccagagagccagagacccaagacagggcccgggctctggacctgggtgcccccctgccaggcgaggctgactccgcgtgagatggttggttaaggcggggtttttctggggcgtgaggcctgtgagatcctgacccaagctcaggcacacccaaggcacctgcctctctgagtcttgggtctcagttcctaatatcccgctccttgctgagaccatctcctggggcagggtccttttcttcccaggtcctcagcgctgcctctgctggtgccttctcccccactactactggagcgtgcccttgctggggacgtggctgtgccctcagttgcccccagggctgggtgcccaccatgccccttcctctttctcctcctacctctgccctgtgagcccatccataaggctctcagatgggacattgtgggaaaggctttggccatggtctgggggcagagaacaaggggggagacacaagtagacctcaggtagaacgacactgggcggagccaccccagggcctgctcccagggagtgctcgaggcgcatcaggcccgttttttaccagtttatatcacggtcttcatttttaaaagtaacgctaactttgtacggacgatgtctcatggattaaataatattctttatggca

SEQ ID NO: 13729 - DNA, 11772 bp, Homo sapiens
accctagcatcctgtgattcagccgcgaagacgtggccccaagcctcccaccgccctccttctgtcctgactgcccactcccagggacaccaggtgacgcctcgcccacccgcggctccggagccaggctggaagcagcttcccgcccagggggtggtttccccacatcctgtcttcagatggcttgagccccctaaacttcctggtcatatccagtggataataatggtctccctctttcctgtctggaggggagggggctgcttacttcttatccaagggcctgtcccgtcccacccctgtgtccccatttctggccacacgcaggctcagcccttgcatcaagcctctgcctgtttccctctgggctgcacctgtcacgctctccctgccctgccccataaagcccatagagcccagggcttgtggggactgcacccttcattagcaagactcagagcttctagaaacccacttgtgtgggggtggggagtgcagggagattggtggcaccaggtggagagagggaactgcacctgggggagttgggaggggcagtgggctgggcccgcgtggaggagtgtggcttgtacagtccgcatggcggggggacccttgtaccctgcctggactggctggtagagctgttggggacctccctgggggtggccttgcttacccagctgtgcggaacaggcttggttgggagtgcctggcctcaccctttgtggggaaaccagattctctgggcagcagtggtaaatggtgtctgagtctgtgtttcgttggatgtgtctgaggtccgctgctgccagctgggttatgctgtctccaaagctatctgcagtgggggaggccctgagcctgggcaggggagggtacagaggcctcaacccatgggacctgggggtgatctgaactctgcacttcactttttttcaggatttcccccgccccaccctaaaggaggaggaaatagagtctgtcccaccctaagccccagtccctctccccaggtctctttggcatctcccagctgggctggggctgaaggcccttctctggggttggccacagtgaggccaggatctggctgggcaggtggcagtgttccgcctgtgggctgggtgcggaggcgggcctgggggtcttagagagagagcggcggatgtgactgcgggccaggaggaagcctggtcccaggatgtcaccatttcccctgcagtgagcaagcatctctagggctcggagataagtgctgggtggggtagctccagctctccagcgcttttttctgtctggttcctgccatctggacttgagccatgaggaaggccagagtgggtctgacagtccccactcctttccccgctgagccccaaggaaggggctgggcctttgcacccccaccccaacttctgcacgagttggaggcagttgatctcaatggtggaaagtggctggtgcaaagtcatgcttccatactccatgtttaggcttcatgggtgtcaaagctgggccgtgaccttgtcccattccctcagagaagggaactgaggccagagggtggagctgctctcaggccgctgcccaggcctcttgtgctctgcggttcagatggcactcccgatgccaggctcctgcccaggaagacatgcccacccgccctggccctgtctctgctgtctggtgtcaggccacctctcttcgggacccccccccaactgattgccctggggctgaccaggctctcctctccctcagtgttgggttttgggagcctctctcatcaggaggttggcacagatgccagccatgcagcggatcctgggcaggggtctcagctgggatggcctggccttgggacagggaggctggctgggcagaaccctagaaccaaaagcggtgcctgtggtgggctagggagctaggtggggagtctagtggggagtctagtggggaggtccactagacactcgttctggcacagcatgcagcgtcctccatcctggccctgctgtgggtacggagccagcagggcaggagctctcagtggagccctccaaagagggctgcttcctggaccagctgcaggatgagggagaccccttctgtccagggctgacataggctgaccaccgccagccccaccctctcactagcttcccattcagttagccattgatgagggctcactgggtgcaggatcctgggctgcccggggttgggtaggggactcctacatgtaggtaaatccgcgagatgctggagagagcaggcaataaagtggttgattctctctggaggtgacattttactttcctagtagggcttggccaggcaggcaaggtggagcctggtgtgccaggcgcagcgcttcagatgagaggaggtgagagcttggggatggcacagggaagtgttttgtctggtgagggtgtggcagggagggcaggcctgaagggacctccagggaggtgtgatcagatctgggttccagaaagatcctacctgcttggcgaccttaactgagctggagtctggaggccccacccttgcacccagctgcttccactgcttgcctcccatcccccagtgccagttccccagggcagtgccctccccatgccctcttggtgtaccctggtcccaaaggaggccaagctatgaacttttcttgcagaggtcccaggtgaggctgttgtcctggagctgtccccagagcaggcttaggatgaggggacctagccacagcttcaaccgagtggggtcccggtgtggctgccagggctccttggcaccaacccagcccagtgggttgatctctgaggacctcgtcatactcagccgggcagtctgccctggggggtggggtcaggactccccagcacttcgggatggaaggaggcgaagccagcgctgctggactagccttaaagaagcgggagacatcctagctccgcctcaagatttctcctctgcacccagcattctgctccccaaatgtcccaaatatgcagggggtcaaggaacattgctcagtggaatcaatggggagcgtgggctactccccagcctctggtttgccccatagcagccccttgggcaccgctggggacccccaggcctctgaggagcttggtttggaaagcgctggaatgctggaccaagttccctctctggctccctgagagggggtcttctagccccagtcttagggcaagaggagcccgtcccctaggagcctccaggccctggagccagacatcgggcgtcctagctacaccctttcctggctatgtgagcttgggcaagttaccaaacccctctgagcctccattcaccatctacagaatggaagagacgctaatgtcaccctggaaggtgttttgaagggtaatgtgtgtaaagggccaaacaaggccccgcacagttaaggacttaaatcctgcccggccccgggagggcttccggcatcttggggttcccctcaaaggatggcctgggcaggacttcttaaaaacaaacaggcggctgggcgcggtggctcacgcctgtaatcccagcactttgggaggccgaggcaggcggatcacgaggtcaggggatcgagaccatcctggctaacatggtgaaaccccgtctctactaaaagtataaaaaattagccgggtgtggtggcgggcgtctgtagtcccagctcctccggaggctgaggcaggagaatggcgtgaacccgggaggcggtgcttgaagggagctgagatcatgccactgcactccagcctgggctacagagcgagactccatctcaaaaaaaaaaaaaaaacaggaatgcccctgggtttcgtgctttaaaatggttgattttatgttgtgtgacttttaagttcaataaattaccaatcaaagcaacaaaacacttccagatcatttgaactttgccttaagtatcagaaggcagttagtaattcctggactttgaatgttaaatatgtggggttcttttgttttgttttgttttgtttcgagacggagtcttgctctgtcacccaggctggagtgcagtggcgcgatctcggctcactgcaacctccatctcccgggttcaagtaactctcctgcctcagcctcccgagtagctgggattacaggcccaccacacccagctaattattttgttgtttttggttttggttttggttgtgagacagagtctcacactgtcatctgggctggagtacaatggcgcgatcttggctcactgcaacctccgcctcccatgtttaagtgattctcctgcctcagcctcctgagtagctgggattacaggcgcccgccaccacacccggctacttttttgtatttttagtagagatggggtttcactatgttggccagactggtctcgaactcctgacctcgtgatccaccctcctcagcctcccaaagtgctgggattacaggcgtgagccactgcacccagccccggctaatttttgtattcttagtagagacagggtttcaccatgttggccaggctggtctcgaactcttgacctcatgattcccccaccttggcctcccaaagtgctgggattacaggtgtgagcgcctgcaccctgcccaaaaatatgtggttttgtttgttttttgaggcagagtctccctctgtcgcccaggctggagtgtaatggcacaatctcggctcactgcaacctccgcctcccaggttcaagcaattctcctgcctcaacctcccgagtagctgggactaaaggtgtgcaccaccatacccagctaacttttgtatttttagtagagatgggtttttaccatgttggccaggccgatctcgaactcctgacctcaggtgatccacctgcctcagcctcccaaaatgctgggattacaggtgtgagctactgcccctggccgaaagttaaatgtttctgttctgttcaagtaatattgagaaaaataacaggggccatcttgactctaatgttctgctccaatcaggttcccagaccagaggactgttgttaggtgattggctgtgaacaccctgaggccagtgcccctcgctgcttggcactcggagatgcctgattagcacctttaatcccttaccagtgaggcaggtggaattggccccattttacagatggggagactgaggtgaggaaggttaaagcactcagtggtgggcatgccccctggagccggccctcctttcttccagctgtgagtacccaggaagctgcaccgtgtggcctggagctgtctatctgtccttccagccacctgtctgtccagccacccttccacagactgaggcttgacaccggagcatctgtacagagcaaggagaagacaagaacatgctctaaagcccttcacagcaagacccaggaagccgcgggcaaactcagactcgaaggtaggaagctgggcggccgggtggctggacccagggcgctggctgctgtgcccacgtccagatacctcctgcggggcccacgctctctgtctgaacagcggtggacagtgaatgaagaaagtcaattcagggagcgagagggaggaataagggcagggaagggacgggcgcggtggctcacgcctgtaatcccagcattttgggaggccgaggtgagtggatcacctgaggtcaggagttcgagactggcctggccaacatggcaaaaccccatctctactaaaaatacaaaaaatttagctgggcgtggtggtgcgcgcctgtagtcccagctacttgggaggctgaggcaggagaatcgctcgaacctgggaggcagaggttgcagtgagccaagatcatgccactgcactccagcctgggctgcagagtgagactacatctcaaaaaaaaaaaaaatttgccaggcatgctggctcacgcctgtaatccaagcactttgggaggccaaggcgggtggaggccaggagtttgagaccagcctgaccaacatggagaaacccagtctctactaaaaaatacaaaattagctgggcatggcggtgcatgcctgtaatcccaactactcgggaggctgaggcaggagaattgcttgaacccaggaggcggaggctgcagtgagctcagatcgtgccactgcactccagcctgggcaacaagaatgaaactcagtctcaaaaaaaaaaaaaaaaaaaaaaaggcaggaagcgaggtgggaccggcactgctcaaggtggggcaggagggcacttgaactgcaaccaggaggctgagaagagccagcccctcctctgtgtgatggtctgggacagagtgactggctcggacagaggcccaacattatggagcacctgcttcattgagagagaattcacacaccagtcgattcacccatttaaagtgtaccatcagtgtttttatttatttatttatattttgagacagggtctcactctgttacccaggctggagtacagtggcgcgatcacggttcactgcagcctcgaccttcctagctcaagccatccttctgcctcagcctcctgagtagctgggactatatgcacgcaccaccatatctggctaattttttaatttttttatacagatgggatctcactatgttgctcaggctggtcttgaactcctgggctcaagtgatcttcctgcctcagtctctcaaattgctgggattacaggcatgaaccaccgctcccaaccttcagtgattttgatatattcacagaggctgggcacagtggctcacacctgtaatctcagcactttctgagaggccgaagcaaacttgaggtaaggagttcgagactagcctggccaacatggtgaaaccccatctctactaaagatacaaacattacccaggcatggtggcttgcgcctgtagtcccagctactcgggagactgaggcaggagaatcgcttgaacctgggaagtggaggttggcagtgagccaaaatcgcaccactgcgctctagcctgggtgacagagcaagactctgtctcaaaaactatatgtgtgtgtgtgtgtgtgtgtgtgtgtgtgtgtgtgtgtacatatatatacatattcacagaattgtgccaccatcaccacagtttcagattgctttcatcaccccctaaagaaagcctgcaccctttagctgtcaccccctgcccagtccccaccttcccagtcctaagaaccactaccctgcttctgtctatagatttccctcttctattccgagctttcatatgaatggactcatgcagaggtggccatcgtgactggctcctgtccctggacacaatgttctcaaagctcgtccacgttgtagctttgttaggacttccttccttttgtggctgaaggatgctccattgtgtggctcaaccacattttatatttgtgccttcatctgctgacgggcgcttgtgctgttttcctgctccggctctgcagagccgtgctgccgggcacttcctgtccaggtttctgtgtggacacagtgcttcagtgtgtgaagccatctgctcattttttgttgttgtttgagacggagtctcactctgtcgcccaggctggaggcctggagtgcagtggcgagatctcggctcactgtaaccacaccccccgtcctgggttcaagtgattctcctgcctcagtctcccgaatagctgggactacagttgcccaccaccacacccagctcttttttttttttttttttttttgagacagagttttgctgttgttgcccaggctggagtgcaatggcgagatttcggctcaccgctaactccaccttccaggttcaagcgattctcctgcctcagcctcccgagtagctgggattacagggatgcaccaccatgcctggctaatgttttttgtatttttagtagagataggctttctccatgttggtcaggctggtctcgaactcccgacctcaggtgatccgcccgcctcggcctcccaaaatgctgggattacaggcatgagccaccgcgcccagcctaatttttgtatttttagtagagatggggtttcaccatgttggccaggctggtcttgaactcctggccttaggtgatccgcccacctcagcctcccaaaatgctgagattacaggcgtgagccactgtgcccggtgacatcatccactcatttgctcctccagacgcttctctggggaggaaccgttactctcccccttgtgcaggtcaggacttgggtgatgagttgtcaggtgactaacccgacagcaaatgcaagaccattggcccagtatgcgctgccggctccattgcttttgatcatgaaccccacccccagcagagcttggccagtttgagacaatgaggggcccaggaaagctgggtcaggggtaagcaagggcacaggaagagacgaagagaggtcctggaagtcccagtgagacgtttggactttgggtgagaacaggaaatcctgggagagagttgagcagggaagcaacaggtgtgatctatgcttttgggaggtgaccccagctgcggtgcggagaatgatcagtctcagggggcttgaggcagcaggtagaggaattgagagagtggagtgagcctccaggtgaggagatggtggaggtgaggtggagatggtggaggtgaggtagagatggaggaggaggacaggttcagatggctgctgtctcgccgacccgtgcatgccacgcctcagcccacacacgcccttggctgaagggctcccagggagatgggtatggagtccctggcttcgtacaaggagaggaaaaacaaaacttgcccaggaaccttgggatgtgaaggagaggaaacagctgggggggtttatttttatttttatttttatttttgagacgaagtttcgctcttgttgcccaggctggagtgcaatggtgcaatctcggctcactgcaacctctgcctcccgggttcaagcaattctcctacctcagcctcccgagtagctgagattacaggcatgcgccaccacacccagctaattttttgtatttttagtagagacggggtttctccatgttggtcatgctggtctcgaactcccgacctcaggtgatctgcccaccttggcctcccaaagtgctgggagtacaggcatgagccaccgcgcccggccacagctgggggttttaacaagaagacggtcatggggcagagcaagagacgaaacgaagagaatgaaacaggcagagggtgttaattctggtggagtcagaggggaactggggactggtggcacacgcacaggaaagccccagatggggtactgggcaacagccactgaaatttgggatgtacttactcttcaacccagccattctgcttccagaacttggtcttgtaatagttaaacaagcacacgcggtgtatgcaagggtgttagttgcaacatcagacccatgtctcaaattccggaaacatcctaaataaccagcagtctggacttaagtaaatcttggtgcattccacttatgaaatctttgcattcatcaaaaaagacaagaggcctagggccgggtgtggtggctgaaacctgtaatcccagcactttgggaggccgaggcaggtggatcacctgaggtcaggagttcgagaccagcctgaccaacatggagaaaccccatctctactaaaaatacaaaattagctgggcgtggtggcgcatgcccgtaatccgagcttcttgggaggctgaggcaggagaatcacttgaacctgggaggtggaggttgcggtgagccgagatcgcgccactgcactccaatctgggtgacagaatgagaccccatcacaaaaaaaaagaaaaaagaaaaaaagtaggtctgtccgtatgtgttgacagggaaagatgtctacaatgcaggtaaaatgatagagtgtgggctgggcttggtggctcacgcccataaccccggctacttgggaggctgaggcaagagaattgcttgaacctgggaggtggagggtgcaatgagattggctcacagcaatctcttcctctcgggttcaagtgattctcctgcctcagcctcccgagtagctggaactacaggaatgaggcactatgcctggctaatttttgtattttagtagagatggtgtttcactgtgttggccaggctagtctcgaactcctgaccttaagtgatccatccaccttggtctcccaaagtgttgggattgtacgtgtaagccaccacacacagctgtgtgattttttttttttttcaatgagcatatgccacttttattgttaaacagtgttctcactatgggggagaaaagtgccagacaggtggcagtttcagttatcttttttttttgagacattttctcactctgtcgcccaggctggagtgcagtggcatgatcttggctcactgcaacctctgcctcctgggttcaagcaattctcgtgcctcagcctcccaagtagctgggattataggcatgcgccaccacacctggctaattttgtatttttagtagagacagggttttaccatgttggccaggctggtctcaaactcctgacctcaggtgatccacctacctcggcctcccaaagtgctgggattacaggcatgagccacgcacccagccagttttagttatctttgaaaaatgaactggggctgggcacagtgagcttgcacctgtaatcccagcacttgggaggccaaggcaggcagatggcttaagcccaggagttccagaccagcctggctaacatggagagacccccacctctacagaaaaaagacaagaaaaataaactgggtggccttgggggacagggaccagcacagtaggtttctcatctctcggcccacctcggcctccccaagtgctggtattacaggtgtgagccaccgtccctggcctgcatcttcatgctcttttcagggtttggttcttgcctcaagcggagagatcagaaattgaatgaggtagtaagttgaggacctcccagacccatatggtccgggatgcaaatgatggtcagaaatagacctcactccaaccactgggcctgaggttcagcctggttcaggctgggtttagtccccagggatggtttgtttttggttttgtgtgtgtgtgtgtgtgtgtgtgtgtgtgtgtgtgtgtgtgtgtgtgtgttttcagacagagtcttgctctgtcgccaggctggagtgcagtggcgcgatctcggcttactataaccgctgcctcctgggttcaagccatcctgcctcagcctcccgagtagctgggattacaggcacgtgccaccacgcctagctaattttttgtatttttagtagagacggggtttcaccatgttggccaggatggtctcgatctcctgacctcgtgatccccccacctcggcctcccaaagtgctgggattacaggcgtgagccaccgcgcccagccgcccagagatgtttgaaccaactttaggcaagttggttcttggtctgggctgcgtgccctggcgtcagggtcctgacactgcgccaccccgcaccgcccaccgctgctctcccggtctccattccagccctcccgcctcctgcccacaatggcctctgctgacaagaatggcgggagcgtgtcctctgtgtccagcagccgcctgcagagccggaagccacccaacctctccatcaccatcccgccacccgagaaagagacccaggcccctggcgagcaggacagcatgc

SEQ ID NO: 13730 - DNA, 572 bp, Homo sapiens
accctagcatcctgtgattcagccgcgaagacgtggccccaagcctcccaccgccctccttctgtcctgactgcccactcccagggacaccaggttcccagaccagaggactgttgttaggtgattggctgtgaacaccctgaggccagtgcccctcgctgcttggcactcggagatgcctgattagcacctttaatcccttaccagtgagctgtgagtacccaggaagctgcaccgtgtggcctggagctgtctatctgtccttccagccacctgtctgtccagccacccttccacagactgaggcttgacaccggagcatctgtacagagcaaggagaagacaagaacatgctctaaagcccttcacagcaagacccaggaagccgcgggcaaactcagactcgaagccctcccgcctcctgcccacaatggcctctgctgacaagaatggcgggagcgtgtcctctgtgtccagcagccgcctgcagagccggaagccacccaacctctccatcaccatcccgccacccgagaaagagacccaggcccctggcgagcaggacagcatgc

SEQ ID NO: 13731 - DNA, 22210 bp, Homo sapiens
ggagccaccgcccagccgctcgcaggcgccgcacggagttgcgtcccggggacttggggccgcagggaggtgagcgcggggcgacgagcggggcaggactcacggccgcccagccgcaggcgccggaagggtcccgaggttgtgcccgagcctgccctggagcggtggtgcgcggccaggaagggtgcccagtgcccggtgcccgccctgcggagcgcctgggtcccacgtgggctcggctggaggcccgggctggctcagacggcgccggcggggccgctggacccggtctgctggcccctagggctcggctcggacaggacgcctaaggggtccctgggcgacggggcgccagatgtaggggcaagacgattgggcagagatttaaacctccggaggaagagaggagactgcgcagggcagtcccgcctgcgtcccagaagtgcctgcagttcagacccttctctcccctccactttctcccgggtgagcaccgggcggaccggggccgaagtttgttggttgagccagccaaggtggaaacaggtgcgggggtggggatgagggactcacacagcagggctggaccggagctcagaaattggacccaggagtcctgacttctggatggaggggctggggaaggttggccctgggcttgccttttacctgtttggcccctcggatgttcccccagggcattgggatagagacggataagttccctagggtacagaccccgccccactcccacgccagggcgcaaaggaagcctaggttttggccctgccccattccatgaaagattaacggagggggctctagggttggagctactgagagggtggcagcgggtgtgtctgaggagcagaaggcggtggggagctgaccccacttggggagaggctgctgttgcctgggcggctggcatcaggcccccagtgtgtgccatttgctggtaatataatgagaccagcatctgccttattcgaccctcactgtccgtagggcaggcagtggaaagggaggcgtgttttagagctgtggttctcaaccaggggcgactttgcctgccatgggatatttggcaatgttggagtcattttgggtgtcacacacttgggaggggaagtgagtgttgttgttactggcaggtagtgggtagaggccagggacgctaccagacatcttcagggcacggaacagcccacataacgaggaattatccagcccaaggtgttgggctgtgctgaggctgagaaaccctgcgcagcagctggtccatcaggttccttctcaatgatgctccctcactggggaaactacctcagttttccagagtggttaggggaggaacttggaataaacctgaatgagatgaggggtaaggcagtgtgagggcacttattcccctcacaagagtcttcctttggtgccatgagacaccgcctttcccaatctccactggccctgcaggaagctggtctaggtgctgtgggggagaggttgggaacagaggacccccttgcagcccaggcctggggtgcttaaccccagggcaatctcccaggaaggctgggctgaggcagcccttgagctcaaatatccctgggctgggagggtgggcagagggcgagctctcttcccatagattttcccaaagctggattgctgaagctggcatggttgcctgataccatgtgacctgctggaattttcccttctgaactcacacctaactcctccaattatgtacaccttttgaaagtgacatccaaggagtatcagggctcctaattcctggggggtccccaggctgcttttgtcctgcaataaagagggcaccctgggttagctgacgagccctggagtgggcccagctgctgatggggtggaggcacccctgcccatggtgttagctgagcagaggtgagagatgggagacatcaaagcacaggccaggtggccccccagtagggatgactcagagttgtttgtattgggctggaggaatgtacttccagttttctggcaacaaggaggggtggctggcacggtgggagaggatcggatgaagcagccacgtccatgcccaggagctggggccacctcgctgccctccctccctgttttcttgcagtagccattatacccatcctgttcacttctggacccagccttcttgcctgggaaccctggtggaggtttcgagcttgggttctttttgttggtgttggtggcttttgttttttttgttttgttttgtttttgtttttgtttttttggtctcttgactgtaaaaggctgaagtgaaactcccaccttttcatttgcacaaaaaacaaaagtggcctccattgctgtgagcctctcaagggacagggctgagcacccaggcttgtacaaagttgttcaggaagtcggcagtggagctcgggtgtgaacccagttgcccaccctcaggccccacccaagagccccacgaacaaaccctcagtgactcctacctgtctgtacctggtgtaaccacacacacacacagacacacacaaacagacacacagagacacacacaaacacacagacacacacagactcacacacacacacacacacacacacacacacacactctctttctctccagcccaggagggggacttttgttcctataagaggaggaataaatcacactacaaatgctttgggtgacgcacttggggcccgagtcctgctctggggtcagtggtgctgtttttcctgtggcctcagctctggatactgtggtggcctctccaccaaggtttctgtccttgctgtgtaaactctgccccagacaaggtgacagatgacagcagaagtcaaggagctgtgcacgcctgcccgtgagtgtgcgagtggcatggctcagctggctggtgcttccctttgggcctggcccccgcctgccgctggcacagcacagggaagacgtgtgccctcctggctgcctctccccctccacactctcctcagatctctgtgcctcgcactctggagcaggcctcggcgctgccccatctgccccaggggatttccagagtgagctcaggcatctgcaccggctgtggaagcgctggctgtcggaagcggctcccagtttcctatccagctgagccaggctgggggaggagtggcggggacgtctgcgcctgcccaagtacaggctgacctcggcggtggtggtggctaggcagggacagctctcagggcacgggcggcttcacagggaaaccaagcctgcccggaacgtcgttttgcctcccaggagacctaggatgggtgtaaggaaaaacacatcttccgggaagtacaaagcgccaccgtgtccacggcccctccttcagcaaatgtatccgggcgcccagctgggagttgtttgtggtccaaaagctactggaaggcagttccagccccagtgcccggctcctgcaggaaagtggtttcagccaagtgggcagtgcaggaggtgggccagagacactgtttggagtgtgaggggaaccttgtgaccagcagaaaaggatggaggaggattccaaacttcaggagctgggccaaggtccaggggctgctgggcacagtcgtccatgtgtgtgctcagtaggatgagttcacttaattagtctgtgcctcagtttccccagctgcacagtgggctcactaacagtaatctacctggagggttgtgtgaggtgaggactcccgtggtaaaggtgtgcagcctgcagtgcagtgcccggccatggcaggagcagtgcggggagccatcgtgataatggtgttagggtggcttcaggtaggggcgtggctgccggtccatggcacagacttgggagatggccgaggccctgcctcgtgggctgtcaaggactagatgggaacacgcatatggagcagtggcactgttgttattgttattctgtaggagtggctgtgtctggggtagggggacctcagtgccttgctggccaagggaagtgagggtgggtttccatctgggcatgaactgctgacctctgcccaggggttttcctggcctgccagtgtgtgtgtgtcactgacagtggggtggggggcagctcatggagttggtgcccctcagctgtgctttccctggcgtaggttcctggggctgggagcagggtaaagctgcctcaagtcttggttttctcctctgcctcccccgtgtggccgccaaccctgtgccagcaggtggtgcagggatggcttcctgccccggtctctggcaagaaacccttttccctctcccagtgggtctccccaggttgtcagctccatttagtcataagaagatctggggccaggcgcggtggctcacgcctgtaatcccagcactttgggaggctgaagcaggcagtcacaaggtcaggagatcgggaccatcctggctaatacggtgaaaccccgtctctactaaaaatacaaaaaaattagccaggtgtggtggcatgcacctgtagtcccagctactcaggaggctgaggcaggagaatcgcttgaacccagaaggcagagcttacagtgagccgagatcaccctactgcactccagcctgggcagcagagcgagactccgtctcaaaaaataaaagaaaaaaaaaagagatctggaagaggagggttgaggatctgctgtggggtttggagtgggaacaggactttgaaccctggcctaagccccttttgaccttgccagcccgtgaggatgatgacagccgcctctcacccttagcctcaactaaatgagatcatgtctgtaaaagtcctttgcaagctgagcagtgctgcccaggcagttaggtgctgtcccttcttcatgaatcaaaggcctttgcatgcaggactcactccagcaccccaaacactcagagtcctcacccgttctttttctcctgcccctcaccagttccagggtggcaagaggctgcagagtgtggaggttaagagcgcgggaccctggctggggttgtagccccaccacctccctaactgtgggaccttggacaggtgacttcatctctctgagcctcagtttccccacctgtcgaatagagatctgtcccctgtggggctcgtggctcagatagagactaagtgagcgatggtggcagagctcagccaggaataaaagaaacttccaactgggcgttgggtgtgtgccaggcactgtacattcatatctgctgtcatcttccctggctccctccgtggtggggcatcaacccatctcacagcagaggaggcaggctctgcagcacccacttgcccaaagtctcccagcaggtaggtggcccaggcaggtttgagtcccatctctggccccttattcctcctcattcctcagcaagagagctccacgctgccccgaagcaaggtgtgggccataagcacgtggctttgcaggcctgcttgggacaagcaacctggtgtccccgtgtcctgaaaccctggcagtcactggggctagggccagcctcttccctgggaagcagggagccccagggcaacgttctgggaaatcaggtttattagttccttaatgaccgtttacaagctcagaagtgtctgcctggcattttccctccctgctgaggggctccatgcagccggaggcagaactgggcctccagaagcgctctgagtgtgtcgaggtgagggcccagggatgccgtcggctccctgggctctgcatgctcacacccagccagtccaggcctatttctggctgggtggcactgggcaaggtgcttacctctctgtacaataggtgagaccttgtacctcagctgagctgttcctggggtgagccctcgttcatggtgacaaagtcacatagatcttagaccctgggaggatactagcatcttatgcatacacaaactgaggctcagagatgttaagtggcttgcccaagatcgcacagtggttagagatgggcctgtgaccctgtcttctgccatcgggacagattttcactgtctggaggcaggtggaaaccgggtgggctcctactttgtaagcacaggacagtgccctgtctgtgtacatgggacagtcacaaacggaaatggcctggtcacaccttagtgtcaaggagcctccagcaggagtgaaacggacctctcacacagaccccaggctgcatctcatcctgccccaaccgctgggcttgtgctggaccaccactgcttccaaggacccgtgaaaacccggctgccgggatgcagagaggcagactttcatgaacgtttgcagcaaagggcagttcccaccgagcctgtgttgctgtggcactgtgtggtgcacaccccaccccggaaaccctccagtgtcctggtgtctgaccccaaatggacagggccttttggcccccaggggccacttctgactcctccccttcacaacgatgctgagggagcaggagaactggggcccggctgctgtgcgtgcccccttcccttcattgccccaaagcctgcagtccagccccaggctcgggagctgctgcctcttccctgggatgtggaaggcacctgcatccccgcccagctgctgccacttgcctgcctccatcagcagctttgttttattttgtctgtgtgttttttgagatggagtcttgctctgtcgcccaggctggagtgcagtggcgtgatctcggctcacttcaacctccgcctcccaggttcaagcgattcttctgcctcagcctcctcagtagctgggattacaggcacccgccaccatgcctggctaatttttgtatttttagtagagatggggtttcaccatgttggccaggctagtctagaactcctgacctcaggtgatctgcccacctcagcctcccaaagtgctgggattacaggtgtgagccactgtgcccagcctccaccagcagcttttgaaatccagaaatttccaggggagggcactgtggtgggtggggcccagcgctgtgtccagctcgaggcctggctgcactgccacctcctttggtgcccacccctgtgtcttgccagcagctgctgcacattgggcttcggggatgcaggactccagcacccccagctcagcctgcttcctggaccaggaaccccagccgaggagggggcatttgtatctctgccatccctgctggcaactggtcctgagaaagcccagatggttggtgcagagggggcgtcaggggctgcaccaccctaagaacatgacatgtcaccccccagccccccgcaacacacacacacaggttcacacctcacacccctgatcttggcggctccctggagcacagcacccgcttcccgtgtctgtggttggcttatgacgccccagccactctaaccgggttaaggggagcccagagcctggggccggataggaaaaagcccagagaagtcaggggatggtcagtcccctgaagctgcccctgggggttcttgatcttctgaactgagttcgaggcaagccctggaggggcgaggaggagaaagaaacagctctctgggccaggacccgctgttcgtgggatgtctggggagctgtgtgaacccacaggccgttttgtttctctccatcagcagctgtgggctgaagcgtgtaccggcggagtgggttgagatcgtgtctgcgcccacttgccaccagctccggcctctggggaggtggtgctgagagggagggagagtggctcctgtttggctcctggagacagacagctgggtgtcccaccctcagagtccccagccccctctcccctctgctaactctgccggtggagctcacgccgcagctcatgccaaccctgcccttctgttttgcctctcatgactctccccaaattctgcccccaggcccccagccagccttcttgccactttcctgccctttactcttgccccttctacctcttgccagggcagcgtcactggctacgtgaggcccagcttggggatgcatggggaggtgtaagaacagctgtgccatgagctgtccttccgggcctctggggctggagaaaccccggggtcagcagtaccacgggttttgctggggattgcacagtgggtgaggctcagcttcctctttgcagctttctaaaaatgccctggttcccagcagggccacaggcagggaaaatgagtttcagtttctgtggcaagggagctggggagagaagcagtttccttgtccccagccctcaccctagcatcctgtgattcagccgcgaagacgtggccccaagcctcccaccgccctccttctgtcctgactgcccactcccagggacaccaggtgacgcctcgcccacccgcggctccggagccaggctggaagcagcttcccgcccagggggtggtttccccacatcctgtcttcagatggcttgagccccctaaacttcctggtcatatccagtggataataatggtctccctctttcctgtctggaggggagggggctgcttacttcttatccaagggcctgtcccgtcccacccctgtgtccccatttctggccacacgcaggctcagcccttgcatcaagcctctgcctgtttccctctgggctgcacctgtcacgctctccctgccctgccccataaagcccatagagcccagggcttgtggggactgcacccttcattagcaagactcagagcttctagaaacccacttgtgtgggggtggggagtgcagggagattggtggcaccaggtggagagagggaactgcacctgggggagttgggaggggcagtgggctgggcccgcgtggaggagtgtggcttgtacagtccgcatggcggggggacccttgtaccctgcctggactggctggtagagctgttggggacctccctgggggtggccttgcttacccagctgtgcggaacaggcttggttgggagtgcctggcctcaccctttgtggggaaaccagattctctgggcagcagtggtaaatggtgtctgagtctgtgtttcgttggatgtgtctgaggtccgctgctgccagctgggttatgctgtctccaaagctatctgcagtgggggaggccctgagcctgggcaggggagggtacagaggcctcaacccatgggacctgggggtgatctgaactctgcacttcactttttttcaggatttcccccgccccaccctaaaggaggaggaaatagagtctgtcccaccctaagccccagtccctctccccaggtctctttggcatctcccagctgggctggggctgaaggcccttctctggggttggccacagtgaggccaggatctggctgggcaggtggcagtgttccgcctgtgggctgggtgcggaggcgggcctgggggtcttagagagagagcggcggatgtgactgcgggccaggaggaagcctggtcccaggatgtcaccatttcccctgcagtgagcaagcatctctagggctcggagataagtgctgggtggggtagctccagctctccagcgcttttttctgtctggttcctgccatctggacttgagccatgaggaaggccagagtgggtctgacagtccccactcctttccccgctgagccccaaggaaggggctgggcctttgcacccccaccccaacttctgcacgagttggaggcagttgatctcaatggtggaaagtggctggtgcaaagtcatgcttccatactccatgtttaggcttcatgggtgtcaaagctgggccgtgaccttgtcccattccctcagagaagggaactgaggccagagggtggagctgctctcaggccgctgcccaggcctcttgtgctctgcggttcagatggcactcccgatgccaggctcctgcccaggaagacatgcccacccgccctggccctgtctctgctgtctggtgtcaggccacctctcttcgggacccccccccaactgattgccctggggctgaccaggctctcctctccctcagtgttgggttttgggagcctctctcatcaggaggttggcacagatgccagccatgcagcggatcctgggcaggggtctcagctgggatggcctggccttgggacagggaggctggctgggcagaaccctagaaccaaaagcggtgcctgtggtgggctagggagctaggtggggagtctagtggggagtctagtggggaggtccactagacactcgttctggcacagcatgcagcgtcctccatcctggccctgctgtgggtacggagccagcagggcaggagctctcagtggagccctccaaagagggctgcttcctggaccagctgcaggatgagggagaccccttctgtccagggctgacataggctgaccaccgccagccccaccctctcactagcttcccattcagttagccattgatgagggctcactgggtgcaggatcctgggctgcccggggttgggtaggggactcctacatgtaggtaaatccgcgagatgctggagagagcaggcaataaagtggttgattctctctggaggtgacattttactttcctagtagggcttggccaggcaggcaaggtggagcctggtgtgccaggcgcagcgcttcagatgagaggaggtgagagcttggggatggcacagggaagtgttttgtctggtgagggtgtggcagggagggcaggcctgaagggacctccagggaggtgtgatcagatctgggttccagaaagatcctacctgcttggcgaccttaactgagctggagtctggaggccccacccttgcacccagctgcttccactgcttgcctcccatcccccagtgccagttccccagggcagtgccctccccatgccctcttggtgtaccctggtcccaaaggaggccaagctatgaacttttcttgcagaggtcccaggtgaggctgttgtcctggagctgtccccagagcaggcttaggatgaggggacctagccacagcttcaaccgagtggggtcccggtgtggctgccagggctccttggcaccaacccagcccagtgggttgatctctgaggacctcgtcatactcagccgggcagtctgccctggggggtggggtcaggactccccagcacttcgggatggaaggaggcgaagccagcgctgctggactagccttaaagaagcgggagacatcctagctccgcctcaagatttctcctctgcacccagcattctgctccccaaatgtcccaaatatgcagggggtcaaggaacattgctcagtggaatcaatggggagcgtgggctactccccagcctctggtttgccccatagcagccccttgggcaccgctggggacccccaggcctctgaggagcttggtttggaaagcgctggaatgctggaccaagttccctctctggctccctgagagggggtcttctagccccagtcttagggcaagaggagcccgtcccctaggagcctccaggccctggagccagacatcgggcgtcctagctacaccctttcctggctatgtgagcttgggcaagttaccaaacccctctgagcctccattcaccatctacagaatggaagagacgctaatgtcaccctggaaggtgttttgaagggtaatgtgtgtaaagggccaaacaaggccccgcacagttaaggacttaaatcctgcccggccccgggagggcttccggcatcttggggttcccctcaaaggatggcctgggcaggacttcttaaaaacaaacaggcggctgggcgcggtggctcacgcctgtaatcccagcactttgggaggccgaggcaggcggatcacgaggtcaggggatcgagaccatcctggctaacatggtgaaaccccgtctctactaaaagtataaaaaattagccgggtgtggtggcgggcgtctgtagtcccagctcctccggaggctgaggcaggagaatggcgtgaacccgggaggcggtgcttgaagggagctgagatcatgccactgcactccagcctgggctacagagcgagactccatctcaaaaaaaaaaaaaaaacaggaatgcccctgggtttcgtgctttaaaatggttgattttatgttgtgtgacttttaagttcaataaattaccaatcaaagcaacaaaacacttccagatcatttgaactttgccttaagtatcagaaggcagttagtaattcctggactttgaatgttaaatatgtggggttcttttgttttgttttgttttgtttcgagacggagtcttgctctgtcacccaggctggagtgcagtggcgcgatctcggctcactgcaacctccatctcccgggttcaagtaactctcctgcctcagcctcccgagtagctgggattacaggcccaccacacccagctaattattttgttgtttttggttttggttttggttgtgagacagagtctcacactgtcatctgggctggagtacaatggcgcgatcttggctcactgcaacctccgcctcccatgtttaagtgattctcctgcctcagcctcctgagtagctgggattacaggcgcccgccaccacacccggctacttttttgtatttttagtagagatggggtttcactatgttggccagactggtctcgaactcctgacctcgtgatccaccctcctcagcctcccaaagtgctgggattacaggcgtgagccactgcacccagccccggctaatttttgtattcttagtagagacagggtttcaccatgttggccaggctggtctcgaactcttgacctcatgattcccccaccttggcctcccaaagtgctgggattacaggtgtgagcgcctgcaccctgcccaaaaatatgtggttttgtttgttttttgaggcagagtctccctctgtcgcccaggctggagtgtaatggcacaatctcggctcactgcaacctccgcctcccaggttcaagcaattctcctgcctcaacctcccgagtagctgggactaaaggtgtgcaccaccatacccagctaacttttgtatttttagtagagatgggtttttaccatgttggccaggccgatctcgaactcctgacctcaggtgatccacctgcctcagcctcccaaaatgctgggattacaggtgtgagctactgcccctggccgaaagttaaatgtttctgttctgttcaagtaatattgagaaaaataacaggggccatcttgactctaatgttctgctccaatcaggttcccagaccagaggactgttgttaggtgattggctgtgaacaccctgaggccagtgcccctcgctgcttggcactcggagatgcctgattagcacctttaatcccttaccagtgaggcaggtggaattggccccattttacagatggggagactgaggtgaggaaggttaaagcactcagtggtgggcatgccccctggagccggccctcctttcttccagctgtgagtacccaggaagctgcaccgtgtggcctggagctgtctatctgtccttccagccacctgtctgtccagccacccttccacagactgaggcttgacaccggagcatctgtacagagcaaggagaagacaagaacatgctctaaagcccttcacagcaagacccaggaagccgcgggcaaactcagactcgaaggtaggaagctgggcggccgggtggctggacccagggcgctggctgctgtgcccacgtccagatacctcctgcggggcccacgctctctgtctgaacagcggtggacagtgaatgaagaaagtcaattcagggagcgagagggaggaataagggcagggaagggacgggcgcggtggctcacgcctgtaatcccagcattttgggaggccgaggtgagtggatcacctgaggtcaggagttcgagactggcctggccaacatggcaaaaccccatctctactaaaaatacaaaaaatttagctgggcgtggtggtgcgcgcctgtagtcccagctacttgggaggctgaggcaggagaatcgctcgaacctgggaggcagaggttgcagtgagccaagatcatgccactgcactccagcctgggctgcagagtgagactacatctcaaaaaaaaaaaaaatttgccaggcatgctggctcacgcctgtaatccaagcactttgggaggccaaggcgggtggaggccaggagtttgagaccagcctgaccaacatggagaaacccagtctctactaaaaaatacaaaattagctgggcatggcggtgcatgcctgtaatcccaactactcgggaggctgaggcaggagaattgcttgaacccaggaggcggaggctgcagtgagctcagatcgtgccactgcactccagcctgggcaacaagaatgaaactcagtctcaaaaaaaaaaaaaaaaaaaaaaaggcaggaagcgaggtgggaccggcactgctcaaggtggggcaggagggcacttgaactgcaaccaggaggctgagaagagccagcccctcctctgtgtgatggtctgggacagagtgactggctcggacagaggcccaacattatggagcacctgcttcattgagagagaattcacacaccagtcgattcacccatttaaagtgtaccatcagtgtttttatttatttatttatattttgagacagggtctcactctgttacccaggctggagtacagtggcgcgatcacggttcactgcagcctcgaccttcctagctcaagccatccttctgcctcagcctcctgagtagctgggactatatgcacgcaccaccatatctggctaattttttaatttttttatacagatgggatctcactatgttgctcaggctggtcttgaactcctgggctcaagtgatcttcctgcctcagtctctcaaattgctgggattacaggcatgaaccaccgctcccaaccttcagtgattttgatatattcacagaggctgggcacagtggctcacacctgtaatctcagcactttctgagaggccgaagcaaacttgaggtaaggagttcgagactagcctggccaacatggtgaaaccccatctctactaaagatacaaacattacccaggcatggtggcttgcgcctgtagtcccagctactcgggagactgaggcaggagaatcgcttgaacctgggaagtggaggttggcagtgagccaaaatcgcaccactgcgctctagcctgggtgacagagcaagactctgtctcaaaaactatatgtgtgtgtgtgtgtgtgtgtgtgtgtgtgtgtgtgtgtacatatatatacatattcacagaattgtgccaccatcaccacagtttcagattgctttcatcaccccctaaagaaagcctgcaccctttagctgtcaccccctgcccagtccccaccttcccagtcctaagaaccactaccctgcttctgtctatagatttccctcttctattccgagctttcatatgaatggactcatgcagaggtggccatcgtgactggctcctgtccctggacacaatgttctcaaagctcgtccacgttgtagctttgttaggacttccttccttttgtggctgaaggatgctccattgtgtggctcaaccacattttatatttgtgccttcatctgctgacgggcgcttgtgctgttttcctgctccggctctgcagagccgtgctgccgggcacttcctgtccaggtttctgtgtggacacagtgcttcagtgtgtgaagccatctgctcattttttgttgttgtttgagacggagtctcactctgtcgcccaggctggaggcctggagtgcagtggcgagatctcggctcactgtaaccacaccccccgtcctgggttcaagtgattctcctgcctcagtctcccgaatagctgggactacagttgcccaccaccacacccagctcttttttttttttttttttttttgagacagagttttgctgttgttgcccaggctggagtgcaatggcgagatttcggctcaccgctaactccaccttccaggttcaagcgattctcctgcctcagcctcccgagtagctgggattacagggatgcaccaccatgcctggctaatgttttttgtatttttagtagagataggctttctccatgttggtcaggctggtctcgaactcccgacctcaggtgatccgcccgcctcggcctcccaaaatgctgggattacaggcatgagccaccgcgcccagcctaatttttgtatttttagtagagatggggtttcaccatgttggccaggctggtcttgaactcctggccttaggtgatccgcccacctcagcctcccaaaatgctgagattacaggcgtgagccactgtgcccggtgacatcatccactcatttgctcctccagacgcttctctggggaggaaccgttactctcccccttgtgcaggtcaggacttgggtgatgagttgtcaggtgactaacccgacagcaaatgcaagaccattggcccagtatgcgctgccggctccattgcttttgatcatgaaccccacccccagcagagcttggccagtttgagacaatgaggggcccaggaaagctgggtcaggggtaagcaagggcacaggaagagacgaagagaggtcctggaagtcccagtgagacgtttggactttgggtgagaacaggaaatcctgggagagagttgagcagggaagcaacaggtgtgatctatgcttttgggaggtgaccccagctgcggtgcggagaatgatcagtctcagggggcttgaggcagcaggtagaggaattgagagagtggagtgagcctccaggtgaggagatggtggaggtgaggtggagatggtggaggtgaggtagagatggaggaggaggacaggttcagatggctgctgtctcgccgacccgtgcatgccacgcctcagcccacacacgcccttggctgaagggctcccagggagatgggtatggagtccctggcttcgtacaaggagaggaaaaacaaaacttgcccaggaaccttgggatgtgaaggagaggaaacagctgggggggtttatttttatttttatttttatttttgagacgaagtttcgctcttgttgcccaggctggagtgcaatggtgcaatctcggctcactgcaacctctgcctcccgggttcaagcaattctcctacctcagcctcccgagtagctgagattacaggcatgcgccaccacacccagctaattttttgtatttttagtagagacggggtttctccatgttggtcatgctggtctcgaactcccgacctcaggtgatctgcccaccttggcctcccaaagtgctgggagtacaggcatgagccaccgcgcccggccacagctgggggttttaacaagaagacggtcatggggcagagcaagagacgaaacgaagagaatgaaacaggcagagggtgttaattctggtggagtcagaggggaactggggactggtggcacacgcacaggaaagccccagatggggtactgggcaacagccactgaaatttgggatgtacttactcttcaacccagccattctgcttccagaacttggtcttgtaatagttaaacaagcacacgcggtgtatgcaagggtgttagttgcaacatcagacccatgtctcaaattccggaaacatcctaaataaccagcagtctggacttaagtaaatcttggtgcattccacttatgaaatctttgcattcatcaaaaaagacaagaggcctagggccgggtgtggtggctgaaacctgtaatcccagcactttgggaggccgaggcaggtggatcacctgaggtcaggagttcgagaccagcctgaccaacatggagaaaccccatctctactaaaaatacaaaattagctgggcgtggtggcgcatgcccgtaatccgagcttcttgggaggctgaggcaggagaatcacttgaacctgggaggtggaggttgcggtgagccgagatcgcgccactgcactccaatctgggtgacagaatgagaccccatcacaaaaaaaaagaaaaaagaaaaaaagtaggtctgtccgtatgtgttgacagggaaagatgtctacaatgcaggtaaaatgatagagtgtgggctgggcttggtggctcacgcccataaccccggctacttgggaggctgaggcaagagaattgcttgaacctgggaggtggagggtgcaatgagattggctcacagcaatctcttcctctcgggttcaagtgattctcctgcctcagcctcccgagtagctggaactacaggaatgaggcactatgcctggctaatttttgtattttagtagagatggtgtttcactgtgttggccaggctagtctcgaactcctgaccttaagtgatccatccaccttggtctcccaaagtgttgggattgtacgtgtaagccaccacacacagctgtgtgattttttttttttttcaatgagcatatgccacttttattgttaaacagtgttctcactatgggggagaaaagtgccagacaggtggcagtttcagttatcttttttttttgagacattttctcactctgtcgcccaggctggagtgcagtggcatgatcttggctcactgcaacctctgcctcctgggttcaagcaattctcgtgcctcagcctcccaagtagctgggattataggcatgcgccaccacacctggctaattttgtatttttagtagagacagggttttaccatgttggccaggctggtctcaaactcctgacctcaggtgatccacctacctcggcctcccaaagtgctgggattacaggcatgagccacgcacccagccagttttagttatctttgaaaaatgaactggggctgggcacagtgagcttgcacctgtaatcccagcacttgggaggccaaggcaggcagatggcttaagcccaggagttccagaccagcctggctaacatggagagacccccacctctacagaaaaaagacaagaaaaataaactgggtggccttgggggacagggaccagcacagtaggtttctcatctctcggcccacctcggcctccccaagtgctggtattacaggtgtgagccaccgtccctggcctgcatcttcatgctcttttcagggtttggttcttgcctcaagcggagagatcagaaattgaatgaggtagtaagttgaggacctcccagacccatatggtccgggatgcaaatgatggtcagaaatagacctcactccaaccactgggcctgaggttcagcctggttcaggctgggtttagtccccagggatggtttgtttttggttttgtgtgtgtgtgtgtgtgtgtgtgtgtgtgtgtgtgtgtgtgtgtgtgtgttttcagacagagtcttgctctgtcgccaggctggagtgcagtggcgcgatctcggcttactataaccgctgcctcctgggttcaagccatcctgcctcagcctcccgagtagctgggattacaggcacgtgccaccacgcctagctaattttttgtatttttagtagagacggggtttcaccatgttggccaggatggtctcgatctcctgacctcgtgatccccccacctcggcctcccaaagtgctgggattacaggcgtgagccaccgcgcccagccgcccagagatgtttgaaccaactttaggcaagttggttcttggtctgggctgcgtgccctggcgtcagggtcctgacactgcgccaccccgcaccgcccaccgctgctctcccggtctccattccagccctcccgcctcctgcccacaatggcctctgctgacaagaatggcgggagcgtgtcctctgtgtccagcagccgcctgcagagccggaagccacccaacctctccatcaccatcccgccacccgagaaagagacccaggcccctggcgagcaggacagcatgctgcctgaggtaagggggctggcctgggggctcactgttctgccgtaggtaacagatgtacccacgtgacactttctggtcagtttcacttcccagaggggctccttcctgagccacagctgctgtctgtgcagcccttgactcgggccctaccccctccttcctgggcccgaaatatcacagggagtaaagccaggaaccgggctcactctcatcgtggtcaggggcacacaggaagggccagccccaagaaagtgcttgctggtaaccctggggccctggctgttctcatttcaccccctaggcctggactctcagtctctcttctgagggctgggggctttctttgacatgggtgagcaggggacagtgtctccctggcatcagcagcccgcctaggcagtgtccgcttcctttgggaggacgagaacagatcagtgtttctgacagtctggtctagtgccccataaagagctcattgaaaaccggcttgtggcagcgtgggcttcctgcacagtctggagtataaagggaagcgatgttaacgccccccgttcacccgagagctctgcagaagacacagcagcaggcaggagcgtcatggtgcagaggggagggactggatgaggagttaggaaaacacacgctggccttgacggagaaaagttagacaatggcgattttaaattcagaatgaggctgggcgaggtcgcctcatgcctgtaatctcatcactttgggaggctgaggcagccagatcacttgagcccaggagttcgagaccagactagacaacatagcaagactctgtctctgcaaaaaaaattaaaaaagagctgggtgtggtggcacatgcctgtaatcccagctacttaggacactgaggtagaaggcttgcttgagcctgggaggtcgaggctccagtgagctatgatggtgccactgccctccaacctgggcaacagagcaagactctgtcccaaaaaatatatatataggccgggcatggtagctcatgcctgtaatcccagcactttgggaggccgaggcggccagatcacttgaggtcaggcaggagttcgagaccagcctggccaacatggtgaaaccccgtctctactaaaaatacaaaaattagccgggtgtggtggcacatgcctatagtcccagctactcaggaggctgaggcagaagaatcgcttgaacctgggaggcggaggtgtcagtgagtcgagaccacaccactgcactccagcctggacaatacagtgagattccatctccaaaaaaaaaaaaaaaaaaaaaaaaaaaatatatatatatatatatatacatatacaaacacacacacacacacacacacacacacacacacattatatatatatatttccaaatgaaagcaaattggggcataaatcagggttgaagtttgttctcagggttttcagaataggaggctaaagaaaagccagcccaggacctgggctgcacacaccaccgcctgccctccctccttcctccccaagaggaagaacccagcctacttgaagagcgtcagcctccaggagccacgcagccgatggcaggagagttcagagaagcgccctggcttccgccgccaggcctcactgtcccagagcatccgcaagtgagcccccctacacccaagcccagcaccccccacccagcaacctgtggattctcggggcctggacatgattgggcctggtccctgcgtcccctctctggaaggaggaggccggcattaatgagcaatgtctccctgtggcctattatcatggtatagatggggaaatgggtatgtgctttgcggaatatcacggtgtggaggctggggggcttcgaggagctgggtggatcagtgtgggggtgcctggggccctagcctggctcctcacgctcccgtcatcccctgcttctgctcatctggtcactgggctccagccaggggcctcacaggcagatccgccccccacctccctgtaggcacgcgggcacacacgtgccatcaccccttccacacactcaggtgcacaggcgtagacaagcgtatgcccacctgtcccttgtctgcttccgcaggggcgcagcccagtggtttggagtcagcggcgactgggaggggcagcggcagcagtggcagcgccg

SEQ ID NO: 13732 - DNA, 568 bp, Homo sapiens
ggagccaccgcccagccgctcgcaggcgccgcacggagttgcgtcccggggacttggggccgcagggagccacctgtctgtccagccacccttccacagactgaggcttgacaccggagcatctgtacagagcaaggagaagacaagaacatgctctaaagcccttcacagcaagacccaggaagccgcgggcaaactcagactcgaagccctcccgcctcctgcccacaatggcctctgctgacaagaatggcgggagcgtgtcctctgtgtccagcagccgcctgcagagccggaagccacccaacctctccatcaccatcccgccacccgagaaagagacccaggcccctggcgagcaggacagcatgctgcctgagaggaagaacccagcctacttgaagagcgtcagcctccaggagccacgcagccgatggcaggagagttcagagaagcgccctggcttccgccgccaggcctcactgtcccagagcatccgcaagggcgcagcccagtggtttggagtcagcggcgactgggaggggcagcggcagcagtggcagcgccg

SEQ ID NO: 13733 - DNA, 5605 bp, Homo sapiens
acaatggcctctgctgacaagaatggcgggagcgtgtcctctgtgtccagcagccgcctgcagagccggaagccacccaacctctccatcaccatcccgccacccgagaaagagacccaggcccctggcgagcaggacagcatgctgcctgaggtaagggggctggcctgggggctcactgttctgccgtaggtaacagatgtacccacgtgacactttctggtcagtttcacttcccagaggggctccttcctgagccacagctgctgtctgtgcagcccttgactcgggccctaccccctccttcctgggcccgaaatatcacagggagtaaagccaggaaccgggctcactctcatcgtggtcaggggcacacaggaagggccagccccaagaaagtgcttgctggtaaccctggggccctggctgttctcatttcaccccctaggcctggactctcagtctctcttctgagggctgggggctttctttgacatgggtgagcaggggacagtgtctccctggcatcagcagcccgcctaggcagtgtccgcttcctttgggaggacgagaacagatcagtgtttctgacagtctggtctagtgccccataaagagctcattgaaaaccggcttgtggcagcgtgggcttcctgcacagtctggagtataaagggaagcgatgttaacgccccccgttcacccgagagctctgcagaagacacagcagcaggcaggagcgtcatggtgcagaggggagggactggatgaggagttaggaaaacacacgctggccttgacggagaaaagttagacaatggcgattttaaattcagaatgaggctgggcgaggtcgcctcatgcctgtaatctcatcactttgggaggctgaggcagccagatcacttgagcccaggagttcgagaccagactagacaacatagcaagactctgtctctgcaaaaaaaattaaaaaagagctgggtgtggtggcacatgcctgtaatcccagctacttaggacactgaggtagaaggcttgcttgagcctgggaggtcgaggctccagtgagctatgatggtgccactgccctccaacctgggcaacagagcaagactctgtcccaaaaaatatatatataggccgggcatggtagctcatgcctgtaatcccagcactttgggaggccgaggcggccagatcacttgaggtcaggcaggagttcgagaccagcctggccaacatggtgaaaccccgtctctactaaaaatacaaaaattagccgggtgtggtggcacatgcctatagtcccagctactcaggaggctgaggcagaagaatcgcttgaacctgggaggcggaggtgtcagtgagtcgagaccacaccactgcactccagcctggacaatacagtgagattccatctccaaaaaaaaaaaaaaaaaaaaaaaaaaaatatatatatatatatatatacatatacaaacacacacacacacacacacacacacacacacacattatatatatatatttccaaatgaaagcaaattggggcataaatcagggttgaagtttgttctcagggttttcagaataggaggctaaagaaaagccagcccaggacctgggctgcacacaccaccgcctgccctccctccttcctccccaagaggaagaacccagcctacttgaagagcgtcagcctccaggagccacgcagccgatggcaggagagttcagagaagcgccctggcttccgccgccaggcctcactgtcccagagcatccgcaagtgagcccccctacacccaagcccagcaccccccacccagcaacctgtggattctcggggcctggacatgattgggcctggtccctgcgtcccctctctggaaggaggaggccggcattaatgagcaatgtctccctgtggcctattatcatggtatagatggggaaatgggtatgtgctttgcggaatatcacggtgtggaggctggggggcttcgaggagctgggtggatcagtgtgggggtgcctggggccctagcctggctcctcacgctcccgtcatcccctgcttctgctcatctggtcactgggctccagccaggggcctcacaggcagatccgccccccacctccctgtaggcacgcgggcacacacgtgccatcaccccttccacacactcaggtgcacaggcgtagacaagcgtatgcccacctgtcccttgtctgcttccgcaggggcgcagcccagtggtttggagtcagcggcgactgggaggggcagcggcagcagtggcagcgccgcagcctgcaccactgcagcatgcgctacggccgcctgaaggcctcgtgccagcgtgacctggagctccccagccaggaggcaccgtccttccagggcactgagtccccaaagccctgcaagatgcccaaggtgggatccatggggaaaggaggcaggggtggggaccctaatggctctgcttaccgcccccctcccttccagattgtggatccgctggcccggggccgggccttccgccacccggaggagatggacaggccccacgccccgcacccaccgctgacccccggagtcctgtccctcacctccttcaccagtgtccgttctggctactcccacctgccacgccgcaagagaatgtctgtggcccacatgagcttgcaagctgccgctgccctcctcaaggtgcggggctccctcctgcagggcccccacctctgcccggcctcccttccttgcccctcccttccactcctcatagtagcatcccctaaagctcacctgggcatctgcctacggtgccaaggacagtggatgtgctgggatccctgggcaaagagggaccccgaagcccagcacccaggcgtccatccttctgtcttaaatctcgtgtgaccccctgccaagttttggaacctggtctctgcactgactcttaagctggggaagtgggaagtgagatgcatacttgctcctcatccacccgggttttccaagtccctgttacgtgctgggcaccgcgtgcagagccatcgccatcctggctgagctcgcagcccagggtgagggtcaccattcagggtggtcagtttaggagagcggctgttatcagggaagacattgagttaagcccagaagacacaaggagacgttcactagggaaggaagggaacagcattctcagcagagggaatggcctatgcaagggccaggagcccagaggaagtacagtgctttgagggggcagcaggcggtttgatgtggttttagtgaagggtggttataggagctgtggcaggagatggggtcagaaaggtgggcagggacctggtattccgtgccaagaaacagggacagggagacatggcccaagcctcgggagtgagggtatagaatgtgggttgctttgagtgttagggtaccagcagcccaaggcagaggggcagcagggaccaagggaaaggtgactccaaactgtgccaagagtggtgtgccaacggaagctggtgtctcatttcctggccttccagtctcaggagctcctcttgcccgttcagcttgcagaatctccacgctttgggcaggatccctcctcccaaggcgctgcctgcaggcggatgggcttgatgattccttcggtgttggggctgggggcctaggtggccaggctgtggtcctgatggctgtgcctctgcccgtgcacaggggcgctcggtgctggatgccaccggacagcggtgccgggtggtcaagcgcagctttgccttcccgagcttcctggaggaggatgtggtcgatggggcagacacgtttgactcctccttttttagtaaggcaagcatggggtgtgggacagcaggagttgggtggggtggcctgggagctgggtgaggtgaccttggcattgatcatattcaggaacccctgagggacccagaggcccactgctgggatgtggcatggtcctatgtggagctgctgggcccccatctttctgttgggtagggtgaagacctgcggtggggcacagtgccacccgggaaagtcaccattggggctgacgggcatgtggcttcccaattcattgtgaagagcccgtctgttcagctgtgtcctgcccttgaattgaggttccggggggcagtgtttgggacagactccttacactgtattttcttgtcccccaccccaggaagaaatgagctccatgcctgatgatgtctttgagtcccccccactctctgccagctacttccgagggatcccacactcagcctcccctgtctcccccgatggggtgcaaatccctctgtgagtgctggggcagagtccctcctccaggccagccaccagcctgggggcatccccagacctcaccctggcccccaagccccttctgagcaccctggtggggtctgggagtattttggtgggggattcaggctgaaagccaccatccccaccaggaaggagtatggccgagccccagtccccgggccccggcgcggcaagcgcatcgcctccaaggtgaagcactttgcctttgatcggaagaagcggcactacggcctcggcgtggtgggcaactggctgaaccgcagctaccgccgcagcatcagcagcactgtgcagcggcagctggagagcttcgacagccaccggtgaggtgtcgccctggagcccccaggagagcctggaaggttccaaattcctctgggccctcctgaagcgcccccttactcattcagcaagtgtttcatgagcatcttctgcggatcaggagtgtagtgacaagctcgaaggcgcaccctgtcccaagggttgtgcacatgacctgggaagggccaggggtgcttgctgcctctcttccaccccatgctttctgagcctggtccccagccttgctcccagacagcagtcagtcaacaaatgttcattgagtgtcactgcctgcaggccctaaaatggaacccccagagggtggagcagggagggcagggtcggtcagaggacagttagaagctggggccagggctgggcgccgtggctcacacttgtaattatagcactttgggaggctgagtcagaaggattgcttgagcctaggagtttgagaccagcctgggcaacatagtgagaccctacctctactttaaaagaagaagctggggctgggagggaggggactctgggagaggctatgcagagcccttggggaagaacagggcatctgatttgcagcagcccaataaacactgggcccaaattagaaaataacaagcaggcagggcgcggtggctcacgcctgtaattccagcactttctgaggccgaggcaggcggatcacctgaggtcaggagttcaagaccagcctggccaacatggtgaaaccccatctctactaaaaatacaaaaaattagccgggcgtggtggtgcatgcctgtaatcccagctactcgggaggcttgaggcaggagaatcacttgaacctgggaggcagaggttgcagtgagccaggatcgcaccattgtactccagcctgggcaacaagagcgaaattccatctc

SEQ ID NO: 13734 - DNA, 2097 bp, Homo sapiens
acaatggcctctgctgacaagaatggcgggagcgtgtcctctgtgtccagcagccgcctgcagagccggaagccacccaacctctccatcaccatcccgccacccgagaaagagacccaggcccctggcgagcaggacagcatgctgcctgagaggaagaacccagcctacttgaagagcgtcagcctccaggagccacgcagccgatggcaggagagttcagagaagcgccctggcttccgccgccaggcctcactgtcccagagcatccgcaagggcgcagcccagtggtttggagtcagcggcgactgggaggggcagcggcagcagtggcagcgccgcagcctgcaccactgcagcatgcgctacggccgcctgaaggcctcgtgccagcgtgacctggagctccccagccaggaggcaccgtccttccagggcactgagtccccaaagccctgcaagatgcccaaggtgggatccatggggaaaggaggcaggggtggggaccctaatggctctgcttaccgcccccctcccttccagattgtggatccgctggcccggggccgggccttccgccacccggaggagatggacaggccccacgccccgcacccaccgctgacccccggagtcctgtccctcacctccttcaccagtgtccgttctggctactcccacctgccacgccgcaagagaatgtctgtggcccacatgagcttgcaagctgccgctgccctcctcaaggggcgctcggtgctggatgccaccggacagcggtgccgggtggtcaagcgcagctttgccttcccgagcttcctggaggaggatgtggtcgatggggcagacacgtttgactcctccttttttagtaaggaagaaatgagctccatgcctgatgatgtctttgagtcccccccactctctgccagctacttccgagggatcccacactcagcctcccctgtctcccccgatggggtgcaaatccctctgaaggagtatggccgagccccagtccccgggccccggcgcggcaagcgcatcgcctccaaggtgaagcactttgcctttgatcggaagaagcggcactacggcctcggcgtggtgggcaactggctgaaccgcagctaccgccgcagcatcagcagcactgtgcagcggcagctggagagcttcgacagccaccggtgaggtgtcgccctggagcccccaggagagcctggaaggttccaaattcctctgggccctcctgaagcgcccccttactcattcagcaagtgtttcatgagcatcttctgcggatcaggagtgtagtgacaagctcgaaggcgcaccctgtcccaagggttgtgcacatgacctgggaagggccaggggtgcttgctgcctctcttccaccccatgctttctgagcctggtccccagccttgctcccagacagcagtcagtcaacaaatgttcattgagtgtcactgcctgcaggccctaaaatggaacccccagagggtggagcagggagggcagggtcggtcagaggacagttagaagctggggccagggctgggcgccgtggctcacacttgtaattatagcactttgggaggctgagtcagaaggattgcttgagcctaggagtttgagaccagcctgggcaacatagtgagaccctacctctactttaaaagaagaagctggggctgggagggaggggactctgggagaggctatgcagagcccttggggaagaacagggcatctgatttgcagcagcccaataaacactgggcccaaattagaaaataacaagcaggcagggcgcggtggctcacgcctgtaattccagcactttctgaggccgaggcaggcggatcacctgaggtcaggagttcaagaccagcctggccaacatggtgaaaccccatctctactaaaaatacaaaaaattagccgggcgtggtggtgcatgcctgtaatcccagctactcgggaggcttgaggcaggagaatcacttgaacctgggaggcagaggttgcagtgagccaggatcgcaccattgtactccagcctgggcaacaagagcgaaattccatctc

SEQ ID NO: 13735 - DNA, 13467 bp, Homo sapiens
gtggcaagggagctggggagagaagcagtttccttgtccccagccctcaccctagcatcctgtgattcagccgcgaagacgtggccccaagcctcccaccgccctccttctgtcctgactgcccactcccagggacaccaggtgacgcctcgcccacccgcggctccggagccaggctggaagcagcttcccgcccagggggtggtttccccacatcctgtcttcagatggcttgagccccctaaacttcctggtcatatccagtggataataatggtctccctctttcctgtctggaggggagggggctgcttacttcttatccaagggcctgtcccgtcccacccctgtgtccccatttctggccacacgcaggctcagcccttgcatcaagcctctgcctgtttccctctgggctgcacctgtcacgctctccctgccctgccccataaagcccatagagcccagggcttgtggggactgcacccttcattagcaagactcagagcttctagaaacccacttgtgtgggggtggggagtgcagggagattggtggcaccaggtggagagagggaactgcacctgggggagttgggaggggcagtgggctgggcccgcgtggaggagtgtggcttgtacagtccgcatggcggggggacccttgtaccctgcctggactggctggtagagctgttggggacctccctgggggtggccttgcttacccagctgtgcggaacaggcttggttgggagtgcctggcctcaccctttgtggggaaaccagattctctgggcagcagtggtaaatggtgtctgagtctgtgtttcgttggatgtgtctgaggtccgctgctgccagctgggttatgctgtctccaaagctatctgcagtgggggaggccctgagcctgggcaggggagggtacagaggcctcaacccatgggacctgggggtgatctgaactctgcacttcactttttttcaggatttcccccgccccaccctaaaggaggaggaaatagagtctgtcccaccctaagccccagtccctctccccaggtctctttggcatctcccagctgggctggggctgaaggcccttctctggggttggccacagtgaggccaggatctggctgggcaggtggcagtgttccgcctgtgggctgggtgcggaggcgggcctgggggtcttagagagagagcggcggatgtgactgcgggccaggaggaagcctggtcccaggatgtcaccatttcccctgcagtgagcaagcatctctagggctcggagataagtgctgggtggggtagctccagctctccagcgcttttttctgtctggttcctgccatctggacttgagccatgaggaaggccagagtgggtctgacagtccccactcctttccccgctgagccccaaggaaggggctgggcctttgcacccccaccccaacttctgcacgagttggaggcagttgatctcaatggtggaaagtggctggtgcaaagtcatgcttccatactccatgtttaggcttcatgggtgtcaaagctgggccgtgaccttgtcccattccctcagagaagggaactgaggccagagggtggagctgctctcaggccgctgcccaggcctcttgtgctctgcggttcagatggcactcccgatgccaggctcctgcccaggaagacatgcccacccgccctggccctgtctctgctgtctggtgtcaggccacctctcttcgggacccccccccaactgattgccctggggctgaccaggctctcctctccctcagtgttgggttttgggagcctctctcatcaggaggttggcacagatgccagccatgcagcggatcctgggcaggggtctcagctgggatggcctggccttgggacagggaggctggctgggcagaaccctagaaccaaaagcggtgcctgtggtgggctagggagctaggtggggagtctagtggggagtctagtggggaggtccactagacactcgttctggcacagcatgcagcgtcctccatcctggccctgctgtgggtacggagccagcagggcaggagctctcagtggagccctccaaagagggctgcttcctggaccagctgcaggatgagggagaccccttctgtccagggctgacataggctgaccaccgccagccccaccctctcactagcttcccattcagttagccattgatgagggctcactgggtgcaggatcctgggctgcccggggttgggtaggggactcctacatgtaggtaaatccgcgagatgctggagagagcaggcaataaagtggttgattctctctggaggtgacattttactttcctagtagggcttggccaggcaggcaaggtggagcctggtgtgccaggcgcagcgcttcagatgagaggaggtgagagcttggggatggcacagggaagtgttttgtctggtgagggtgtggcagggagggcaggcctgaagggacctccagggaggtgtgatcagatctgggttccagaaagatcctacctgcttggcgaccttaactgagctggagtctggaggccccacccttgcacccagctgcttccactgcttgcctcccatcccccagtgccagttccccagggcagtgccctccccatgccctcttggtgtaccctggtcccaaaggaggccaagctatgaacttttcttgcagaggtcccaggtgaggctgttgtcctggagctgtccccagagcaggcttaggatgaggggacctagccacagcttcaaccgagtggggtcccggtgtggctgccagggctccttggcaccaacccagcccagtgggttgatctctgaggacctcgtcatactcagccgggcagtctgccctggggggtggggtcaggactccccagcacttcgggatggaaggaggcgaagccagcgctgctggactagccttaaagaagcgggagacatcctagctccgcctcaagatttctcctctgcacccagcattctgctccccaaatgtcccaaatatgcagggggtcaaggaacattgctcagtggaatcaatggggagcgtgggctactccccagcctctggtttgccccatagcagccccttgggcaccgctggggacccccaggcctctgaggagcttggtttggaaagcgctggaatgctggaccaagttccctctctggctccctgagagggggtcttctagccccagtcttagggcaagaggagcccgtcccctaggagcctccaggccctggagccagacatcgggcgtcctagctacaccctttcctggctatgtgagcttgggcaagttaccaaacccctctgagcctccattcaccatctacagaatggaagagacgctaatgtcaccctggaaggtgttttgaagggtaatgtgtgtaaagggccaaacaaggccccgcacagttaaggacttaaatcctgcccggccccgggagggcttccggcatcttggggttcccctcaaaggatggcctgggcaggacttcttaaaaacaaacaggcggctgggcgcggtggctcacgcctgtaatcccagcactttgggaggccgaggcaggcggatcacgaggtcaggggatcgagaccatcctggctaacatggtgaaaccccgtctctactaaaagtataaaaaattagccgggtgtggtggcgggcgtctgtagtcccagctcctccggaggctgaggcaggagaatggcgtgaacccgggaggcggtgcttgaagggagctgagatcatgccactgcactccagcctgggctacagagcgagactccatctcaaaaaaaaaaaaaaaacaggaatgcccctgggtttcgtgctttaaaatggttgattttatgttgtgtgacttttaagttcaataaattaccaatcaaagcaacaaaacacttccagatcatttgaactttgccttaagtatcagaaggcagttagtaattcctggactttgaatgttaaatatgtggggttcttttgttttgttttgttttgtttcgagacggagtcttgctctgtcacccaggctggagtgcagtggcgcgatctcggctcactgcaacctccatctcccgggttcaagtaactctcctgcctcagcctcccgagtagctgggattacaggcccaccacacccagctaattattttgttgtttttggttttggttttggttgtgagacagagtctcacactgtcatctgggctggagtacaatggcgcgatcttggctcactgcaacctccgcctcccatgtttaagtgattctcctgcctcagcctcctgagtagctgggattacaggcgcccgccaccacacccggctacttttttgtatttttagtagagatggggtttcactatgttggccagactggtctcgaactcctgacctcgtgatccaccctcctcagcctcccaaagtgctgggattacaggcgtgagccactgcacccagccccggctaatttttgtattcttagtagagacagggtttcaccatgttggccaggctggtctcgaactcttgacctcatgattcccccaccttggcctcccaaagtgctgggattacaggtgtgagcgcctgcaccctgcccaaaaatatgtggttttgtttgttttttgaggcagagtctccctctgtcgcccaggctggagtgtaatggcacaatctcggctcactgcaacctccgcctcccaggttcaagcaattctcctgcctcaacctcccgagtagctgggactaaaggtgtgcaccaccatacccagctaacttttgtatttttagtagagatgggtttttaccatgttggccaggccgatctcgaactcctgacctcaggtgatccacctgcctcagcctcccaaaatgctgggattacaggtgtgagctactgcccctggccgaaagttaaatgtttctgttctgttcaagtaatattgagaaaaataacaggggccatcttgactctaatgttctgctccaatcaggttcccagaccagaggactgttgttaggtgattggctgtgaacaccctgaggccagtgcccctcgctgcttggcactcggagatgcctgattagcacctttaatcccttaccagtgaggcaggtggaattggccccattttacagatggggagactgaggtgaggaaggttaaagcactcagtggtgggcatgccccctggagccggccctcctttcttccagctgtgagtacccaggaagctgcaccgtgtggcctggagctgtctatctgtccttccagccacctgtctgtccagccacccttccacagactgaggcttgacaccggagcatctgtacagagcaaggagaagacaagaacatgctctaaagcccttcacagcaagacccaggaagccgcgggcaaactcagactcgaaggtaggaagctgggcggccgggtggctggacccagggcgctggctgctgtgcccacgtccagatacctcctgcggggcccacgctctctgtctgaacagcggtggacagtgaatgaagaaagtcaattcagggagcgagagggaggaataagggcagggaagggacgggcgcggtggctcacgcctgtaatcccagcattttgggaggccgaggtgagtggatcacctgaggtcaggagttcgagactggcctggccaacatggcaaaaccccatctctactaaaaatacaaaaaatttagctgggcgtggtggtgcgcgcctgtagtcccagctacttgggaggctgaggcaggagaatcgctcgaacctgggaggcagaggttgcagtgagccaagatcatgccactgcactccagcctgggctgcagagtgagactacatctcaaaaaaaaaaaaaatttgccaggcatgctggctcacgcctgtaatccaagcactttgggaggccaaggcgggtggaggccaggagtttgagaccagcctgaccaacatggagaaacccagtctctactaaaaaatacaaaattagctgggcatggcggtgcatgcctgtaatcccaactactcgggaggctgaggcaggagaattgcttgaacccaggaggcggaggctgcagtgagctcagatcgtgccactgcactccagcctgggcaacaagaatgaaactcagtctcaaaaaaaaaaaaaaaaaaaaaaaggcaggaagcgaggtgggaccggcactgctcaaggtggggcaggagggcacttgaactgcaaccaggaggctgagaagagccagcccctcctctgtgtgatggtctgggacagagtgactggctcggacagaggcccaacattatggagcacctgcttcattgagagagaattcacacaccagtcgattcacccatttaaagtgtaccatcagtgtttttatttatttatttatattttgagacagggtctcactctgttacccaggctggagtacagtggcgcgatcacggttcactgcagcctcgaccttcctagctcaagccatccttctgcctcagcctcctgagtagctgggactatatgcacgcaccaccatatctggctaattttttaatttttttatacagatgggatctcactatgttgctcaggctggtcttgaactcctgggctcaagtgatcttcctgcctcagtctctcaaattgctgggattacaggcatgaaccaccgctcccaaccttcagtgattttgatatattcacagaggctgggcacagtggctcacacctgtaatctcagcactttctgagaggccgaagcaaacttgaggtaaggagttcgagactagcctggccaacatggtgaaaccccatctctactaaagatacaaacattacccaggcatggtggcttgcgcctgtagtcccagctactcgggagactgaggcaggagaatcgcttgaacctgggaagtggaggttggcagtgagccaaaatcgcaccactgcgctctagcctgggtgacagagcaagactctgtctcaaaaactatatgtgtgtgtgtgtgtgtgtgtgtgtgtgtgtgtgtgtgtacatatatatacatattcacagaattgtgccaccatcaccacagtttcagattgctttcatcaccccctaaagaaagcctgcaccctttagctgtcaccccctgcccagtccccaccttcccagtcctaagaaccactaccctgcttctgtctatagatttccctcttctattccgagctttcatatgaatggactcatgcagaggtggccatcgtgactggctcctgtccctggacacaatgttctcaaagctcgtccacgttgtagctttgttaggacttccttccttttgtggctgaaggatgctccattgtgtggctcaaccacattttatatttgtgccttcatctgctgacgggcgcttgtgctgttttcctgctccggctctgcagagccgtgctgccgggcacttcctgtccaggtttctgtgtggacacagtgcttcagtgtgtgaagccatctgctcattttttgttgttgtttgagacggagtctcactctgtcgcccaggctggaggcctggagtgcagtggcgagatctcggctcactgtaaccacaccccccgtcctgggttcaagtgattctcctgcctcagtctcccgaatagctgggactacagttgcccaccaccacacccagctcttttttttttttttttttttttgagacagagttttgctgttgttgcccaggctggagtgcaatggcgagatttcggctcaccgctaactccaccttccaggttcaagcgattctcctgcctcagcctcccgagtagctgggattacagggatgcaccaccatgcctggctaatgttttttgtatttttagtagagataggctttctccatgttggtcaggctggtctcgaactcccgacctcaggtgatccgcccgcctcggcctcccaaaatgctgggattacaggcatgagccaccgcgcccagcctaatttttgtatttttagtagagatggggtttcaccatgttggccaggctggtcttgaactcctggccttaggtgatccgcccacctcagcctcccaaaatgctgagattacaggcgtgagccactgtgcccggtgacatcatccactcatttgctcctccagacgcttctctggggaggaaccgttactctcccccttgtgcaggtcaggacttgggtgatgagttgtcaggtgactaacccgacagcaaatgcaagaccattggcccagtatgcgctgccggctccattgcttttgatcatgaaccccacccccagcagagcttggccagtttgagacaatgaggggcccaggaaagctgggtcaggggtaagcaagggcacaggaagagacgaagagaggtcctggaagtcccagtgagacgtttggactttgggtgagaacaggaaatcctgggagagagttgagcagggaagcaacaggtgtgatctatgcttttgggaggtgaccccagctgcggtgcggagaatgatcagtctcagggggcttgaggcagcaggtagaggaattgagagagtggagtgagcctccaggtgaggagatggtggaggtgaggtggagatggtggaggtgaggtagagatggaggaggaggacaggttcagatggctgctgtctcgccgacccgtgcatgccacgcctcagcccacacacgcccttggctgaagggctcccagggagatgggtatggagtccctggcttcgtacaaggagaggaaaaacaaaacttgcccaggaaccttgggatgtgaaggagaggaaacagctgggggggtttatttttatttttatttttatttttgagacgaagtttcgctcttgttgcccaggctggagtgcaatggtgcaatctcggctcactgcaacctctgcctcccgggttcaagcaattctcctacctcagcctcccgagtagctgagattacaggcatgcgccaccacacccagctaattttttgtatttttagtagagacggggtttctccatgttggtcatgctggtctcgaactcccgacctcaggtgatctgcccaccttggcctcccaaagtgctgggagtacaggcatgagccaccgcgcccggccacagctgggggttttaacaagaagacggtcatggggcagagcaagagacgaaacgaagagaatgaaacaggcagagggtgttaattctggtggagtcagaggggaactggggactggtggcacacgcacaggaaagccccagatggggtactgggcaacagccactgaaatttgggatgtacttactcttcaacccagccattctgcttccagaacttggtcttgtaatagttaaacaagcacacgcggtgtatgcaagggtgttagttgcaacatcagacccatgtctcaaattccggaaacatcctaaataaccagcagtctggacttaagtaaatcttggtgcattccacttatgaaatctttgcattcatcaaaaaagacaagaggcctagggccgggtgtggtggctgaaacctgtaatcccagcactttgggaggccgaggcaggtggatcacctgaggtcaggagttcgagaccagcctgaccaacatggagaaaccccatctctactaaaaatacaaaattagctgggcgtggtggcgcatgcccgtaatccgagcttcttgggaggctgaggcaggagaatcacttgaacctgggaggtggaggttgcggtgagccgagatcgcgccactgcactccaatctgggtgacagaatgagaccccatcacaaaaaaaaagaaaaaagaaaaaaagtaggtctgtccgtatgtgttgacagggaaagatgtctacaatgcaggtaaaatgatagagtgtgggctgggcttggtggctcacgcccataaccccggctacttgggaggctgaggcaagagaattgcttgaacctgggaggtggagggtgcaatgagattggctcacagcaatctcttcctctcgggttcaagtgattctcctgcctcagcctcccgagtagctggaactacaggaatgaggcactatgcctggctaatttttgtattttagtagagatggtgtttcactgtgttggccaggctagtctcgaactcctgaccttaagtgatccatccaccttggtctcccaaagtgttgggattgtacgtgtaagccaccacacacagctgtgtgattttttttttttttcaatgagcatatgccacttttattgttaaacagtgttctcactatgggggagaaaagtgccagacaggtggcagtttcagttatcttttttttttgagacattttctcactctgtcgcccaggctggagtgcagtggcatgatcttggctcactgcaacctctgcctcctgggttcaagcaattctcgtgcctcagcctcccaagtagctgggattataggcatgcgccaccacacctggctaattttgtatttttagtagagacagggttttaccatgttggccaggctggtctcaaactcctgacctcaggtgatccacctacctcggcctcccaaagtgctgggattacaggcatgagccacgcacccagccagttttagttatctttgaaaaatgaactggggctgggcacagtgagcttgcacctgtaatcccagcacttgggaggccaaggcaggcagatggcttaagcccaggagttccagaccagcctggctaacatggagagacccccacctctacagaaaaaagacaagaaaaataaactgggtggccttgggggacagggaccagcacagtaggtttctcatctctcggcccacctcggcctccccaagtgctggtattacaggtgtgagccaccgtccctggcctgcatcttcatgctcttttcagggtttggttcttgcctcaagcggagagatcagaaattgaatgaggtagtaagttgaggacctcccagacccatatggtccgggatgcaaatgatggtcagaaatagacctcactccaaccactgggcctgaggttcagcctggttcaggctgggtttagtccccagggatggtttgtttttggttttgtgtgtgtgtgtgtgtgtgtgtgtgtgtgtgtgtgtgtgtgtgtgtgtgttttcagacagagtcttgctctgtcgccaggctggagtgcagtggcgcgatctcggcttactataaccgctgcctcctgggttcaagccatcctgcctcagcctcccgagtagctgggattacaggcacgtgccaccacgcctagctaattttttgtatttttagtagagacggggtttcaccatgttggccaggatggtctcgatctcctgacctcgtgatccccccacctcggcctcccaaagtgctgggattacaggcgtgagccaccgcgcccagccgcccagagatgtttgaaccaactttaggcaagttggttcttggtctgggctgcgtgccctggcgtcagggtcctgacactgcgccaccccgcaccgcccaccgctgctctcccggtctccattccagccctcccgcctcctgcccacaatggcctctgctgacaagaatggcgggagcgtgtcctctgtgtccagcagccgcctgcagagccggaagccacccaacctctccatcaccatcccgccacccgagaaagagacccaggcccctggcgagcaggacagcatgctgcctgaggtaagggggctggcctgggggctcactgttctgccgtaggtaacagatgtacccacgtgacactttctggtcagtttcacttcccagaggggctccttcctgagccacagctgctgtctgtgcagcccttgactcgggccctaccccctccttcctgggcccgaaatatcacagggagtaaagccaggaaccgggctcactctcatcgtggtcaggggcacacaggaagggccagccccaagaaagtgcttgctggtaaccctggggccctggctgttctcatttcaccccctaggcctggactctcagtctctcttctgagggctgggggctttctttgacatgggtgagcaggggacagtgtctccctggcatcagcagcccgcctaggcagtgtccgcttcctttgggaggacgagaacagatcagtgtttctgacagtctggtctagtgccccataaagagctcattgaaaaccggcttgtggcagcgtgggcttcctgcacagtctggagtataaagggaagcgatgttaacgccccccgttcacccgagagctctgcagaagacacagcagcaggcaggagcgtcatggtgcagaggggagggactggatgaggagttaggaaaacacacgctggccttgacggagaaaagttagacaatggcgattttaaattcagaatgaggctgggcgaggtcgcctcatgcctgtaatctcatcactttgggaggctgaggcagccagatcacttgagcccaggagttcgagaccagactagacaacatagcaagactctgtctctgcaaaaaaaattaaaaaagagctgggtgtggtggcacatgcctgtaatcccagctacttaggacactgaggtagaaggcttgcttgagcctgggaggtcgaggctccagtgagctatgatggtgccactgccctccaacctgggcaacagagcaagactctgtcccaaaaaatatatatataggccgggcatggtagctcatgcctgtaatcccagcactttgggaggccgaggcggccagatcacttgaggtcaggcaggagttcgagaccagcctggccaacatggtgaaaccccgtctctactaaaaatacaaaaattagccgggtgtggtggcacatgcctatagtcccagctactcaggaggctgaggcagaagaatcgcttgaacctgggaggcggaggtgtcagtgagtcgagaccacaccactgcactccagcctggacaatacagtgagattccatctccaaaaaaaaaaaaaaaaaaaaaaaaaaaatatatatatatatatatatacatatacaaacacacacacacacacacacacacacacacacacattatatatatatatttccaaatgaaagcaaattggggcataaatcagggttgaagtttgttctcagggttttcagaataggaggctaaagaaaagccagcccaggacctgggctgcacacaccaccgcctgccctccctccttcctccccaagaggaagaacccagcctacttgaagagcgtcagcctccaggagccacgcagccgatggcaggagagttcagagaagcgccctggcttccgccgccaggcctcactgtcccagagcatccg

SEQ ID NO: 13736 - DNA, 629 bp, Homo sapiens
gtggcaagggagctggggagagaagcagtttccttgtccccagccctcaccctagcatcctgtgattcagccgcgaagacgtggccccaagcctcccaccgccctccttctgtcctgactgcccactcccagggacaccagctgtgagtacccaggaagctgcaccgtgtggcctggagctgtctatctgtccttccagccacctgtctgtccagccacccttccacagactgaggcttgacaccggagcatctgtacagagcaaggagaagacaagaacatgctctaaagcccttcacagcaagacccaggaagccgcgggcaaactcagactcgaagccctcccgcctcctgcccacaatggcctctgctgacaagaatggcgggagcgtgtcctctgtgtccagcagccgcctgcagagccggaagccacccaacctctccatcaccatcccgccacccgagaaagagacccaggcccctggcgagcaggacagcatgctgcctgagaggaagaacccagcctacttgaagagcgtcagcctccaggagccacgcagccgatggcaggagagttcagagaagcgccctggcttccgccgccaggcctcactgtcccagagcatccg

SEQ ID NO: 13737 - DNA, 7344 bp, Homo sapiens
agccctcccgcctcctgcccacaatggcctctgctgacaagaatggcgggagcgtgtcctctgtgtccagcagccgcctgcagagccggaagccacccaacctctccatcaccatcccgccacccgagaaagagacccaggcccctggcgagcaggacagcatgctgcctgaggtaagggggctggcctgggggctcactgttctgccgtaggtaacagatgtacccacgtgacactttctggtcagtttcacttcccagaggggctccttcctgagccacagctgctgtctgtgcagcccttgactcgggccctaccccctccttcctgggcccgaaatatcacagggagtaaagccaggaaccgggctcactctcatcgtggtcaggggcacacaggaagggccagccccaagaaagtgcttgctggtaaccctggggccctggctgttctcatttcaccccctaggcctggactctcagtctctcttctgagggctgggggctttctttgacatgggtgagcaggggacagtgtctccctggcatcagcagcccgcctaggcagtgtccgcttcctttgggaggacgagaacagatcagtgtttctgacagtctggtctagtgccccataaagagctcattgaaaaccggcttgtggcagcgtgggcttcctgcacagtctggagtataaagggaagcgatgttaacgccccccgttcacccgagagctctgcagaagacacagcagcaggcaggagcgtcatggtgcagaggggagggactggatgaggagttaggaaaacacacgctggccttgacggagaaaagttagacaatggcgattttaaattcagaatgaggctgggcgaggtcgcctcatgcctgtaatctcatcactttgggaggctgaggcagccagatcacttgagcccaggagttcgagaccagactagacaacatagcaagactctgtctctgcaaaaaaaattaaaaaagagctgggtgtggtggcacatgcctgtaatcccagctacttaggacactgaggtagaaggcttgcttgagcctgggaggtcgaggctccagtgagctatgatggtgccactgccctccaacctgggcaacagagcaagactctgtcccaaaaaatatatatataggccgggcatggtagctcatgcctgtaatcccagcactttgggaggccgaggcggccagatcacttgaggtcaggcaggagttcgagaccagcctggccaacatggtgaaaccccgtctctactaaaaatacaaaaattagccgggtgtggtggcacatgcctatagtcccagctactcaggaggctgaggcagaagaatcgcttgaacctgggaggcggaggtgtcagtgagtcgagaccacaccactgcactccagcctggacaatacagtgagattccatctccaaaaaaaaaaaaaaaaaaaaaaaaaaaatatatatatatatatatatacatatacaaacacacacacacacacacacacacacacacacacattatatatatatatttccaaatgaaagcaaattggggcataaatcagggttgaagtttgttctcagggttttcagaataggaggctaaagaaaagccagcccaggacctgggctgcacacaccaccgcctgccctccctccttcctccccaagaggaagaacccagcctacttgaagagcgtcagcctccaggagccacgcagccgatggcaggagagttcagagaagcgccctggcttccgccgccaggcctcactgtcccagagcatccgcaagtgagcccccctacacccaagcccagcaccccccacccagcaacctgtggattctcggggcctggacatgattgggcctggtccctgcgtcccctctctggaaggaggaggccggcattaatgagcaatgtctccctgtggcctattatcatggtatagatggggaaatgggtatgtgctttgcggaatatcacggtgtggaggctggggggcttcgaggagctgggtggatcagtgtgggggtgcctggggccctagcctggctcctcacgctcccgtcatcccctgcttctgctcatctggtcactgggctccagccaggggcctcacaggcagatccgccccccacctccctgtaggcacgcgggcacacacgtgccatcaccccttccacacactcaggtgcacaggcgtagacaagcgtatgcccacctgtcccttgtctgcttccgcaggggcgcagcccagtggtttggagtcagcggcgactgggaggggcagcggcagcagtggcagcgccgcagcctgcaccactgcagcatgcgctacggccgcctgaaggcctcgtgccagcgtgacctggagctccccagccaggaggcaccgtccttccagggcactgagtccccaaagccctgcaagatgcccaaggtgggatccatggggaaaggaggcaggggtggggaccctaatggctctgcttaccgcccccctcccttccagattgtggatccgctggcccggggccgggccttccgccacccggaggagatggacaggccccacgccccgcacccaccgctgacccccggagtcctgtccctcacctccttcaccagtgtccgttctggctactcccacctgccacgccgcaagagaatgtctgtggcccacatgagcttgcaagctgccgctgccctcctcaaggtgcggggctccctcctgcagggcccccacctctgcccggcctcccttccttgcccctcccttccactcctcatagtagcatcccctaaagctcacctgggcatctgcctacggtgccaaggacagtggatgtgctgggatccctgggcaaagagggaccccgaagcccagcacccaggcgtccatccttctgtcttaaatctcgtgtgaccccctgccaagttttggaacctggtctctgcactgactcttaagctggggaagtgggaagtgagatgcatacttgctcctcatccacccgggttttccaagtccctgttacgtgctgggcaccgcgtgcagagccatcgccatcctggctgagctcgcagcccagggtgagggtcaccattcagggtggtcagtttaggagagcggctgttatcagggaagacattgagttaagcccagaagacacaaggagacgttcactagggaaggaagggaacagcattctcagcagagggaatggcctatgcaagggccaggagcccagaggaagtacagtgctttgagggggcagcaggcggtttgatgtggttttagtgaagggtggttataggagctgtggcaggagatggggtcagaaaggtgggcagggacctggtattccgtgccaagaaacagggacagggagacatggcccaagcctcgggagtgagggtatagaatgtgggttgctttgagtgttagggtaccagcagcccaaggcagaggggcagcagggaccaagggaaaggtgactccaaactgtgccaagagtggtgtgccaacggaagctggtgtctcatttcctggccttccagtctcaggagctcctcttgcccgttcagcttgcagaatctccacgctttgggcaggatccctcctcccaaggcgctgcctgcaggcggatgggcttgatgattccttcggtgttggggctgggggcctaggtggccaggctgtggtcctgatggctgtgcctctgcccgtgcacaggggcgctcggtgctggatgccaccggacagcggtgccgggtggtcaagcgcagctttgccttcccgagcttcctggaggaggatgtggtcgatggggcagacacgtttgactcctccttttttagtaaggcaagcatggggtgtgggacagcaggagttgggtggggtggcctgggagctgggtgaggtgaccttggcattgatcatattcaggaacccctgagggacccagaggcccactgctgggatgtggcatggtcctatgtggagctgctgggcccccatctttctgttgggtagggtgaagacctgcggtggggcacagtgccacccgggaaagtcaccattggggctgacgggcatgtggcttcccaattcattgtgaagagcccgtctgttcagctgtgtcctgcccttgaattgaggttccggggggcagtgtttgggacagactccttacactgtattttcttgtcccccaccccaggaagaaatgagctccatgcctgatgatgtctttgagtcccccccactctctgccagctacttccgagggatcccacactcagcctcccctgtctcccccgatggggtgcaaatccctctgtgagtgctggggcagagtccctcctccaggccagccaccagcctgggggcatccccagacctcaccctggcccccaagccccttctgagcaccctggtggggtctgggagtattttggtgggggattcaggctgaaagccaccatccccaccaggaaggagtatggccgagccccagtccccgggccccggcgcggcaagcgcatcgcctccaaggtgaagcactttgcctttgatcggaagaagcggcactacggcctcggcgtggtgggcaactggctgaaccgcagctaccgccgcagcatcagcagcactgtgcagcggcagctggagagcttcgacagccaccggtgaggtgtcgccctggagcccccaggagagcctggaaggttccaaattcctctgggccctcctgaagcgcccccttactcattcagcaagtgtttcatgagcatcttctgcggatcaggagtgtagtgacaagctcgaaggcgcaccctgtcccaagggttgtgcacatgacctgggaagggccaggggtgcttgctgcctctcttccaccccatgctttctgagcctggtccccagccttgctcccagacagcagtcagtcaacaaatgttcattgagtgtcactgcctgcaggccctaaaatggaacccccagagggtggagcagggagggcagggtcggtcagaggacagttagaagctggggccagggctgggcgccgtggctcacacttgtaattatagcactttgggaggctgagtcagaaggattgcttgagcctaggagtttgagaccagcctgggcaacatagtgagaccctacctctactttaaaagaagaagctggggctgggagggaggggactctgggagaggctatgcagagcccttggggaagaacagggcatctgatttgcagcagcccaataaacactgggcccaaattagaaaataacaagcaggcagggcgcggtggctcacgcctgtaattccagcactttctgaggccgaggcaggcggatcacctgaggtcaggagttcaagaccagcctggccaacatggtgaaaccccatctctactaaaaatacaaaaaattagccgggcgtggtggtgcatgcctgtaatcccagctactcgggaggcttgaggcaggagaatcacttgaacctgggaggcagaggttgcagtgagccaggatcgcaccattgtactccagcctgggcaacaagagcgaaattccatctcaaaaaaaaaagaaagaaaagaaaaagaaaataacaagcaatggccaggcccggtggctcacacctgtaatcccagcacttcgggaggcctaggtgggcagatcacctgaggtcaggagttcgagaccagcctggccaacacagtgaaaactggtctctactaaaaagacaaacaaaattaggcaggtatggtgggtgcttgtaatcccagctacgagggaggctgaggcaggagaatcgcttgaacctgggggcgaaggttgcagtgagctgagatcgcacaactgcattccagcctaggtgacagagcgagactctgtctcaaaaaaaaaaaaagaaaagaaaagaacaagcaatgataggtgtggtgggtgtcccggaggaggatagagagggagagtgaacagctggtggggaggggtgcagtcaggacaaactgtgatgtcatgtgcaaaggccctggggctggaagggcaaagtacatcccaggaaatgcaggcaaagaggccagagaggtggtcggtcaggcaaagctttgcagccagcaagagggggtgattctggaatttgtcccaaggccagtggaaagctatcaaaaggttttaagctaggagagagatgcttggaggctcgtcttaaaagttcctctggtttgagatgagttgacggggcagaacagggagcccaggcgagccatgtgaccaggccagggtggccctgtggccgggactgggggttgggataggagctcggctcagctgacccgaggtgtctctgcacaggccctacttcacctactggctgaccttcgtccatgtcatcatcacgctgctggtgatttgcacgtatggcatcgcacccgtgggctttgcccagcacgtcaccacccagctggtgagtcgggtcaggctccatgctgggggtcccagcctctcctaggaggcctcagtgtcgtgggtacctaatccctcccaccgcaacaatctggccccagcagggtggtgctcaccatagcctggccccttcctggaggctctatcctggggacagctgccccagctccccatgcccagggcccacactgttctgacgccctcctctgtgctacctccacgataggtgctgcggaacaaaggtgtgtacgagagcgtgaagtacatccagcaggagaacttctgggttggccccagctcggtgagggcccaggctgggggacatcatctgagccaggagtccctgtgccctgtcactcccagctgggcaggtgggctcctcacccacccgcaggcccctcatcaggggagactctgcggggcagaggtggagtgatggacccctcccaggtctggggctcaaactcactctctcccctccctttcccttccccagattgacctgatccacctgggggccaagttctcaccctgcatccggaaggacgggcagatcgagcagctggtgctgcgcgagcgagacctggagcgggactcaggctgctgtgtccagaatgaccactccggatgcatccagacccagcggaaggactgctcggtgggggcaggccctccctcctacccctgccagaccctggtcccggactagctccacttgccctgtccttcaagggcagtgaccacgttccctcctccccgccccacctttcccagacccccatagatgagactgagccctggggagatgggaaaagcctctgtccttg

SEQ ID NO: 13738 - DNA, 1726 bp, Homo sapiens
agccctcccgcctcctgcccacaatggcctctgctgacaagaatggcgggagcgtgtcctctgtgtccagcagccgcctgcagagccggaagccacccaacctctccatcaccatcccgccacccgagaaagagacccaggcccctggcgagcaggacagcatgctgcctgagaggaagaacccagcctacttgaagagcgtcagcctccaggagccacgcagccgatggcaggagagttcagagaagcgccctggcttccgccgccaggcctcactgtcccagagcatccgcaagggcgcagcccagtggtttggagtcagcggcgactgggaggggcagcggcagcagtggcagcgccgcagcctgcaccactgcagcatgcgctacggccgcctgaaggcctcgtgccagcgtgacctggagctccccagccaggaggcaccgtccttccagggcactgagtccccaaagccctgcaagatgcccaagattgtggatccgctggcccggggccgggccttccgccacccggaggagatggacaggccccacgccccgcacccaccgctgacccccggagtcctgtccctcacctccttcaccagtgtccgttctggctactcccacctgccacgccgcaagagaatgtctgtggcccacatgagcttgcaagctgccgctgccctcctcaaggggcgctcggtgctggatgccaccggacagcggtgccgggtggtcaagcgcagctttgccttcccgagcttcctggaggaggatgtggtcgatggggcagacacgtttgactcctccttttttagtaaggcaagcatgggctccatgcctgatgatgtctttgagtcccccccactctctgccagctacttccgagggatcccacactcagcctcccctgtctcccccgatggggtgcaaatccctctgaaggagtatggccgagccccagtccccgggccccggcgcggcaagcgcatcgcctccaaggtgaagcactttgcctttgatcggaagaagcggcactacggcctcggcgtggtgggcaactggctgaaccgcagctaccgccgcagcatcagcagcactgtgcagcggcagctggagagcttcgacagccaccggccctacttcacctactggctgaccttcgtccatgtcatcatcacgctgctggtgatttgcacgtatggcatcgcacccgtgggctttgcccagcacgtcaccacccagctggtgctgcggaacaaaggtgtgtacgagagcgtgaagtacatccagcaggagaacttctgggttggccccagctcggtgagggcccaggctgggggacatcatctgagccaggagtccctgtgccctgtcactcccagctgggcagattgacctgatccacctgggggccaagttctcaccctgcatccggaaggacgggcagatcgagcagctggtgctgcgcgagcgagacctggagcgggactcaggctgctgtgtccagaatgaccactccggatgcatccagacccagcggaaggactgctcggtgggggcaggccctccctcctacccctgccagaccctggtcccggactagctccacttgccctgtccttcaagggcagtgaccacgttccctcctccccgccccacctttcccagacccccatagatgagactgagccctggggagatgggaaaagcctctgtccttg

SEQ ID NO: 13739 - DNA, 6841 bp, Homo sapiens
tttgccttcccgagcttcctggaggaggatgtggtcgatggggcagacacgtttgactcctccttttttagtaaggcaagcatggggtgtgggacagcaggagttgggtggggtggcctgggagctgggtgaggtgaccttggcattgatcatattcaggaacccctgagggacccagaggcccactgctgggatgtggcatggtcctatgtggagctgctgggcccccatctttctgttgggtagggtgaagacctgcggtggggcacagtgccacccgggaaagtcaccattggggctgacgggcatgtggcttcccaattcattgtgaagagcccgtctgttcagctgtgtcctgcccttgaattgaggttccggggggcagtgtttgggacagactccttacactgtattttcttgtcccccaccccaggaagaaatgagctccatgcctgatgatgtctttgagtcccccccactctctgccagctacttccgagggatcccacactcagcctcccctgtctcccccgatggggtgcaaatccctctgtgagtgctggggcagagtccctcctccaggccagccaccagcctgggggcatccccagacctcaccctggcccccaagccccttctgagcaccctggtggggtctgggagtattttggtgggggattcaggctgaaagccaccatccccaccaggaaggagtatggccgagccccagtccccgggccccggcgcggcaagcgcatcgcctccaaggtgaagcactttgcctttgatcggaagaagcggcactacggcctcggcgtggtgggcaactggctgaaccgcagctaccgccgcagcatcagcagcactgtgcagcggcagctggagagcttcgacagccaccggtgaggtgtcgccctggagcccccaggagagcctggaaggttccaaattcctctgggccctcctgaagcgcccccttactcattcagcaagtgtttcatgagcatcttctgcggatcaggagtgtagtgacaagctcgaaggcgcaccctgtcccaagggttgtgcacatgacctgggaagggccaggggtgcttgctgcctctcttccaccccatgctttctgagcctggtccccagccttgctcccagacagcagtcagtcaacaaatgttcattgagtgtcactgcctgcaggccctaaaatggaacccccagagggtggagcagggagggcagggtcggtcagaggacagttagaagctggggccagggctgggcgccgtggctcacacttgtaattatagcactttgggaggctgagtcagaaggattgcttgagcctaggagtttgagaccagcctgggcaacatagtgagaccctacctctactttaaaagaagaagctggggctgggagggaggggactctgggagaggctatgcagagcccttggggaagaacagggcatctgatttgcagcagcccaataaacactgggcccaaattagaaaataacaagcaggcagggcgcggtggctcacgcctgtaattccagcactttctgaggccgaggcaggcggatcacctgaggtcaggagttcaagaccagcctggccaacatggtgaaaccccatctctactaaaaatacaaaaaattagccgggcgtggtggtgcatgcctgtaatcccagctactcgggaggcttgaggcaggagaatcacttgaacctgggaggcagaggttgcagtgagccaggatcgcaccattgtactccagcctgggcaacaagagcgaaattccatctcaaaaaaaaaagaaagaaaagaaaaagaaaataacaagcaatggccaggcccggtggctcacacctgtaatcccagcacttcgggaggcctaggtgggcagatcacctgaggtcaggagttcgagaccagcctggccaacacagtgaaaactggtctctactaaaaagacaaacaaaattaggcaggtatggtgggtgcttgtaatcccagctacgagggaggctgaggcaggagaatcgcttgaacctgggggcgaaggttgcagtgagctgagatcgcacaactgcattccagcctaggtgacagagcgagactctgtctcaaaaaaaaaaaaagaaaagaaaagaacaagcaatgataggtgtggtgggtgtcccggaggaggatagagagggagagtgaacagctggtggggaggggtgcagtcaggacaaactgtgatgtcatgtgcaaaggccctggggctggaagggcaaagtacatcccaggaaatgcaggcaaagaggccagagaggtggtcggtcaggcaaagctttgcagccagcaagagggggtgattctggaatttgtcccaaggccagtggaaagctatcaaaaggttttaagctaggagagagatgcttggaggctcgtcttaaaagttcctctggtttgagatgagttgacggggcagaacagggagcccaggcgagccatgtgaccaggccagggtggccctgtggccgggactgggggttgggataggagctcggctcagctgacccgaggtgtctctgcacaggccctacttcacctactggctgaccttcgtccatgtcatcatcacgctgctggtgatttgcacgtatggcatcgcacccgtgggctttgcccagcacgtcaccacccagctggtgagtcgggtcaggctccatgctgggggtcccagcctctcctaggaggcctcagtgtcgtgggtacctaatccctcccaccgcaacaatctggccccagcagggtggtgctcaccatagcctggccccttcctggaggctctatcctggggacagctgccccagctccccatgcccagggcccacactgttctgacgccctcctctgtgctacctccacgataggtgctgcggaacaaaggtgtgtacgagagcgtgaagtacatccagcaggagaacttctgggttggccccagctcggtgagggcccaggctgggggacatcatctgagccaggagtccctgtgccctgtcactcccagctgggcaggtgggctcctcacccacccgcaggcccctcatcaggggagactctgcggggcagaggtggagtgatggacccctcccaggtctggggctcaaactcactctctcccctccctttcccttccccagattgacctgatccacctgggggccaagttctcaccctgcatccggaaggacgggcagatcgagcagctggtgctgcgcgagcgagacctggagcgggactcaggctgctgtgtccagaatgaccactccggatgcatccagacccagcggaaggactgctcggtgggggcaggccctccctcctacccctgccagaccctggtcccggactagctccacttgccctgtccttcaagggcagtgaccacgttccctcctccccgccccacctttcccagacccccatagatgagactgagccctggggagatgggaaaagcctctgtccttgcccactccagtgggggtgacctggccccgacatgacccaccagccttcttctgccctccaggagactttggccacttttgtcaagtggcaggatgacactgggccccccatggacaagtctgatctgggccagaagcggacttcgggggctgtctgccaccaggaccccaggtagggcctggagcctctgctgggcctcagggtcaggcatagccatgccatctgagccacccacagggacgtgggtaggtggacgtggcacgctgggtgtgccacagcccaatctgaaccctgtctccaggacctgcgaggagccagcctccagcggtgcccacatctggcccgatgacatcactaagtggccggtgagtgtccctggcggggagtggtctgggaaggtcagggatgggggacctgcctgctgcacagcccacttccctgccggtgccccctcctggcagatctgcacagagcaggccaggagcaaccacacaggcttcctgcacatggactgcgagatcaagggccgcccctgctgcatcggcaccaagggcaggtgagcgacctgggccctggcctcagccatcccactgcccccccgagctgcggcttcctgtgggccctctgctcctccaccgtcaccacccacagccgctgggccgatgccctccaataactgtcctttgctcccctgctctggggctacccatggtgcgagctggaggaaggaagcttgctccagagtcgaaggttctggatgcggcatcccccttcctgccagcgatgcctcctgtagccaggtgctgggctctgggcaaaggtgggcagtggttattcggcgccctgatgtcccctcttgcctcaccacccccttagctgtgagatcaccacccgggaatactgtgagttcatgcacggctatttccatgaggaagcaacactctgctcccaggtgaggcgaggcaggcctggagtagtggaggagaggacgctgggcatggcagcctgctggggccggggctcacgcactccctcccatgtcggagcctcagactcagcctgcttctggggcgctgagcaccatatgcccactcccaggtgcactgcttggacaaggtgtgtgggctgctgcccttcctcaaccctgaggtcccagatcagttctacaggctctggctgtctctcttcctacatgctgggtaagaggctcctcactgcccccgaacccgacccctgtgatggccacccagccggacccctggggaaaggttcctgggccagggcatggccggcccaacctgccgaagcctactgctcctgaagtgcctggctgaaggccgctgcctggtgtgtccctcccccagcgtggtgcactgcctcgtgtctgtggtctttcaaatgaccatcctgagggacctggagaagctggccggctggcaccgtatcgccatcatcttcatcctcagtggcatcacaggcaacctcgccagtgccatctttctcccataccgggcagaggtaaggatgtggaggatgggaccccttccgcacatagggggccagccctgctgctcctattccacccacctgggatctgccagagggacacggtgcccctcctgtactgggctccacagcggagggacagctaatctgggggcttactggctggtctcttaatcccagtgagagggaacagtgatgctcttgagtcaccctgtccctccaccgcctcatttatcttcctaaccgtgcccactgcctgacagtatgctaggtatctgcaggtcgagcggtaggaaatggcctccgtgcgccgtcggcagtctgatcagttccacctgactgatctagtttgttcagtgtccgtcctctccccaccgtgtgcggcctggaacaggcttgtctgtcttgcttattgctacggacccacaccaggcacgtacacagtaggcgctcagtgtttgctgaaagaatgggcggagcaggcccagctttggtccagcagctccagccgaccccctgcccctcagcctcaggggtccccatgcctgccagggaggagctgatcgatgggatgacccagggtgcaggcccggcccaggccacccacctgatgcctgaagccacgtctcccctgccccgccccaggtgggcccggccggctcacagttcggcctcctcgcctgcctcttcgtggagctcttccagagctggccgctgctggagaggccctggaaggccttcctcaacctctcggccatcgtgctcttcctgttcatctgtggcctcctgccctggatcgacaacatcgcccacatcttcggcttcctcagtggcctgctgctggccttcgccttcctgccctacatcaccttcggcaccagcgacaagtaccgcaagcgggcactcatcctggtgtcactgctggcctttgccggcctcttcgccgccctcgtgctgtggctgtacatctaccccattaactggccctggatcgagcacctcacctgcttccccttcaccagccgcttctgcgagaagtatgagctggaccaggtgctgcactgaccgctgggccacacggctgcccctcagccctgctggaacagggtctgcctgcgagggctgccctctgcagagcgctctctgtgtgccagagagccagagacccaagacagggcccgggctctggacctgggtgcccccctgccaggcgaggctgactccgcgtgagatggttggttaaggcggggtttttctggggcgtgaggcctgtgagatcctgacccaagctcaggcacacccaaggcacctgcctctctgagtcttgggtctcagttcctaatatcccgctccttgctgagaccatctcctggggcagggtccttttcttcccaggtcctcagcgctgcctctgctggtgccttctcccccactactactggagcgtgcccttgctggggacgtggctgtgccctcagttgcccccagggctgggtgcccaccatgccccttcctctttctcctcctacctctgccctgtgagcccatccataaggctctcagatgggacattgtgggaaaggctttggccatggtctgggggcagagaacaaggggggagacacaagtagacctcaggtagaacgacactgggcggagccaccccagggcctgctcccagggagtgctcgaggcgcatcaggcccgttttttaccagtttatatcacggtcttcatttttaaaagtaacgctaactttgtacggacgatgtctcatggattaaataatattctttatggcagtaca

SEQ ID NO: 13740 - DNA, 2665 bp, Homo sapiens
tttgccttcccgagcttcctggaggaggatgtggtcgatggggcagacacgtttgactcctccttttttagtaaggaagaaatgagctccatgcctgatgatgtctttgagtcccccccactctctgccagctacttccgagggatcccacactcagcctcccctgtctcccccgatggggtgcaaatccctctgaaggagtatggccgagccccagtccccgggccccggcgcggcaagcgcatcgcctccaaggtgaagcactttgcctttgatcggaagaagcggcactacggcctcggcgtggtgggcaactggctgaaccgcagctaccgccgcagcatcagcagcactgtgcagcggcagctggagagcttcgacagccaccggccctacttcacctactggctgaccttcgtccatgtcatcatcacgctgctggtgatttgcacgtatggcatcgcacccgtgggctttgcccagcacgtcaccacccagctggtgctgcggaacaaaggtgtgtacgagagcgtgaagtacatccagcaggagaacttctgggttggccccagctcgattgacctgatccacctgggggccaagttctcaccctgcatccggaaggacgggcagatcgagcagctggtgctgcgcgagcgagacctggagcgggactcaggctgctgtgtccagaatgaccactccggatgcatccagacccagcggaaggactgctcggagactttggccacttttgtcaagtggcaggatgacactgggccccccatggacaagtctgatctgggccagaagcggacttcgggggctgtctgccaccaggaccccaggacctgcgaggagccagcctccagcggtgcccacatctggcccgatgacatcactaagtggccgatctgcacagagcaggccaggagcaaccacacaggcttcctgcacatggactgcgagatcaagggccgcccctgctgcatcggcaccaagggcagctgtgagatcaccacccgggaatactgtgagttcatgcacggctatttccatgaggaagcaacactctgctcccaggtgcactgcttggacaaggtgtgtgggctgctgcccttcctcaaccctgaggtcccagatcagttctacaggctctggctgtctctcttcctacatgctgggtaagaggctcctcactgcccccgaacccgacccctgtgatggccacccagccggacccctggggaaaggttcctgggccagggcatggccggcccaacctgccgaagcctactgctcctgaagtgcctggctgaaggccgctgcctggtgtgtccctcccccagcgtggtgcactgcctcgtgtctgtggtctttcaaatgaccatcctgagggacctggagaagctggccggctggcaccgtatcgccatcatcttcatcctcagtggcatcacaggcaacctcgccagtgccatctttctcccataccgggcagaggtgggcccggccggctcacagttcggcctcctcgcctgcctcttcgtggagctcttccagagctggccgctgctggagaggccctggaaggccttcctcaacctctcggccatcgtgctcttcctgttcatctgtggcctcctgccctggatcgacaacatcgcccacatcttcggcttcctcagtggcctgctgctggccttcgccttcctgccctacatcaccttcggcaccagcgacaagtaccgcaagcgggcactcatcctggtgtcactgctggcctttgccggcctcttcgccgccctcgtgctgtggctgtacatctaccccattaactggccctggatcgagcacctcacctgcttccccttcaccagccgcttctgcgagaagtatgagctggaccaggtgctgcactgaccgctgggccacacggctgcccctcagccctgctggaacagggtctgcctgcgagggctgccctctgcagagcgctctctgtgtgccagagagccagagacccaagacagggcccgggctctggacctgggtgcccccctgccaggcgaggctgactccgcgtgagatggttggttaaggcggggtttttctggggcgtgaggcctgtgagatcctgacccaagctcaggcacacccaaggcacctgcctctctgagtcttgggtctcagttcctaatatcccgctccttgctgagaccatctcctggggcagggtccttttcttcccaggtcctcagcgctgcctctgctggtgccttctcccccactactactggagcgtgcccttgctggggacgtggctgtgccctcagttgcccccagggctgggtgcccaccatgccccttcctctttctcctcctacctctgccctgtgagcccatccataaggctctcagatgggacattgtgggaaaggctttggccatggtctgggggcagagaacaaggggggagacacaagtagacctcaggtagaacgacactgggcggagccaccccagggcctgctcccagggagtgctcgaggcgcatcaggcccgttttttaccagtttatatcacggtcttcatttttaaaagtaacgctaactttgtacggacgatgtctcatggattaaataatattctttatggcagtaca

SEQ ID NO: 13741 - DNA, 19926 bp, Homo sapiens
gacttggggccgcagggaggtgagcgcggggcgacgagcggggcaggactcacggccgcccagccgcaggcgccggaagggtcccgaggttgtgcccgagcctgccctggagcggtggtgcgcggccaggaagggtgcccagtgcccggtgcccgccctgcggagcgcctgggtcccacgtgggctcggctggaggcccgggctggctcagacggcgccggcggggccgctggacccggtctgctggcccctagggctcggctcggacaggacgcctaaggggtccctgggcgacggggcgccagatgtaggggcaagacgattgggcagagatttaaacctccggaggaagagaggagactgcgcagggcagtcccgcctgcgtcccagaagtgcctgcagttcagacccttctctcccctccactttctcccgggtgagcaccgggcggaccggggccgaagtttgttggttgagccagccaaggtggaaacaggtgcgggggtggggatgagggactcacacagcagggctggaccggagctcagaaattggacccaggagtcctgacttctggatggaggggctggggaaggttggccctgggcttgccttttacctgtttggcccctcggatgttcccccagggcattgggatagagacggataagttccctagggtacagaccccgccccactcccacgccagggcgcaaaggaagcctaggttttggccctgccccattccatgaaagattaacggagggggctctagggttggagctactgagagggtggcagcgggtgtgtctgaggagcagaaggcggtggggagctgaccccacttggggagaggctgctgttgcctgggcggctggcatcaggcccccagtgtgtgccatttgctggtaatataatgagaccagcatctgccttattcgaccctcactgtccgtagggcaggcagtggaaagggaggcgtgttttagagctgtggttctcaaccaggggcgactttgcctgccatgggatatttggcaatgttggagtcattttgggtgtcacacacttgggaggggaagtgagtgttgttgttactggcaggtagtgggtagaggccagggacgctaccagacatcttcagggcacggaacagcccacataacgaggaattatccagcccaaggtgttgggctgtgctgaggctgagaaaccctgcgcagcagctggtccatcaggttccttctcaatgatgctccctcactggggaaactacctcagttttccagagtggttaggggaggaacttggaataaacctgaatgagatgaggggtaaggcagtgtgagggcacttattcccctcacaagagtcttcctttggtgccatgagacaccgcctttcccaatctccactggccctgcaggaagctggtctaggtgctgtgggggagaggttgggaacagaggacccccttgcagcccaggcctggggtgcttaaccccagggcaatctcccaggaaggctgggctgaggcagcccttgagctcaaatatccctgggctgggagggtgggcagagggcgagctctcttcccatagattttcccaaagctggattgctgaagctggcatggttgcctgataccatgtgacctgctggaattttcccttctgaactcacacctaactcctccaattatgtacaccttttgaaagtgacatccaaggagtatcagggctcctaattcctggggggtccccaggctgcttttgtcctgcaataaagagggcaccctgggttagctgacgagccctggagtgggcccagctgctgatggggtggaggcacccctgcccatggtgttagctgagcagaggtgagagatgggagacatcaaagcacaggccaggtggccccccagtagggatgactcagagttgtttgtattgggctggaggaatgtacttccagttttctggcaacaaggaggggtggctggcacggtgggagaggatcggatgaagcagccacgtccatgcccaggagctggggccacctcgctgccctccctccctgttttcttgcagtagccattatacccatcctgttcacttctggacccagccttcttgcctgggaaccctggtggaggtttcgagcttgggttctttttgttggtgttggtggcttttgttttttttgttttgttttgtttttgtttttgtttttttggtctcttgactgtaaaaggctgaagtgaaactcccaccttttcatttgcacaaaaaacaaaagtggcctccattgctgtgagcctctcaagggacagggctgagcacccaggcttgtacaaagttgttcaggaagtcggcagtggagctcgggtgtgaacccagttgcccaccctcaggccccacccaagagccccacgaacaaaccctcagtgactcctacctgtctgtacctggtgtaaccacacacacacacagacacacacaaacagacacacagagacacacacaaacacacagacacacacagactcacacacacacacacacacacacacacacacacactctctttctctccagcccaggagggggacttttgttcctataagaggaggaataaatcacactacaaatgctttgggtgacgcacttggggcccgagtcctgctctggggtcagtggtgctgtttttcctgtggcctcagctctggatactgtggtggcctctccaccaaggtttctgtccttgctgtgtaaactctgccccagacaaggtgacagatgacagcagaagtcaaggagctgtgcacgcctgcccgtgagtgtgcgagtggcatggctcagctggctggtgcttccctttgggcctggcccccgcctgccgctggcacagcacagggaagacgtgtgccctcctggctgcctctccccctccacactctcctcagatctctgtgcctcgcactctggagcaggcctcggcgctgccccatctgccccaggggatttccagagtgagctcaggcatctgcaccggctgtggaagcgctggctgtcggaagcggctcccagtttcctatccagctgagccaggctgggggaggagtggcggggacgtctgcgcctgcccaagtacaggctgacctcggcggtggtggtggctaggcagggacagctctcagggcacgggcggcttcacagggaaaccaagcctgcccggaacgtcgttttgcctcccaggagacctaggatgggtgtaaggaaaaacacatcttccgggaagtacaaagcgccaccgtgtccacggcccctccttcagcaaatgtatccgggcgcccagctgggagttgtttgtggtccaaaagctactggaaggcagttccagccccagtgcccggctcctgcaggaaagtggtttcagccaagtgggcagtgcaggaggtgggccagagacactgtttggagtgtgaggggaaccttgtgaccagcagaaaaggatggaggaggattccaaacttcaggagctgggccaaggtccaggggctgctgggcacagtcgtccatgtgtgtgctcagtaggatgagttcacttaattagtctgtgcctcagtttccccagctgcacagtgggctcactaacagtaatctacctggagggttgtgtgaggtgaggactcccgtggtaaaggtgtgcagcctgcagtgcagtgcccggccatggcaggagcagtgcggggagccatcgtgataatggtgttagggtggcttcaggtaggggcgtggctgccggtccatggcacagacttgggagatggccgaggccctgcctcgtgggctgtcaaggactagatgggaacacgcatatggagcagtggcactgttgttattgttattctgtaggagtggctgtgtctggggtagggggacctcagtgccttgctggccaagggaagtgagggtgggtttccatctgggcatgaactgctgacctctgcccaggggttttcctggcctgccagtgtgtgtgtgtcactgacagtggggtggggggcagctcatggagttggtgcccctcagctgtgctttccctggcgtaggttcctggggctgggagcagggtaaagctgcctcaagtcttggttttctcctctgcctcccccgtgtggccgccaaccctgtgccagcaggtggtgcagggatggcttcctgccccggtctctggcaagaaacccttttccctctcccagtgggtctccccaggttgtcagctccatttagtcataagaagatctggggccaggcgcggtggctcacgcctgtaatcccagcactttgggaggctgaagcaggcagtcacaaggtcaggagatcgggaccatcctggctaatacggtgaaaccccgtctctactaaaaatacaaaaaaattagccaggtgtggtggcatgcacctgtagtcccagctactcaggaggctgaggcaggagaatcgcttgaacccagaaggcagagcttacagtgagccgagatcaccctactgcactccagcctgggcagcagagcgagactccgtctcaaaaaataaaagaaaaaaaaaagagatctggaagaggagggttgaggatctgctgtggggtttggagtgggaacaggactttgaaccctggcctaagccccttttgaccttgccagcccgtgaggatgatgacagccgcctctcacccttagcctcaactaaatgagatcatgtctgtaaaagtcctttgcaagctgagcagtgctgcccaggcagttaggtgctgtcccttcttcatgaatcaaaggcctttgcatgcaggactcactccagcaccccaaacactcagagtcctcacccgttctttttctcctgcccctcaccagttccagggtggcaagaggctgcagagtgtggaggttaagagcgcgggaccctggctggggttgtagccccaccacctccctaactgtgggaccttggacaggtgacttcatctctctgagcctcagtttccccacctgtcgaatagagatctgtcccctgtggggctcgtggctcagatagagactaagtgagcgatggtggcagagctcagccaggaataaaagaaacttccaactgggcgttgggtgtgtgccaggcactgtacattcatatctgctgtcatcttccctggctccctccgtggtggggcatcaacccatctcacagcagaggaggcaggctctgcagcacccacttgcccaaagtctcccagcaggtaggtggcccaggcaggtttgagtcccatctctggccccttattcctcctcattcctcagcaagagagctccacgctgccccgaagcaaggtgtgggccataagcacgtggctttgcaggcctgcttgggacaagcaacctggtgtccccgtgtcctgaaaccctggcagtcactggggctagggccagcctcttccctgggaagcagggagccccagggcaacgttctgggaaatcaggtttattagttccttaatgaccgtttacaagctcagaagtgtctgcctggcattttccctccctgctgaggggctccatgcagccggaggcagaactgggcctccagaagcgctctgagtgtgtcgaggtgagggcccagggatgccgtcggctccctgggctctgcatgctcacacccagccagtccaggcctatttctggctgggtggcactgggcaaggtgcttacctctctgtacaataggtgagaccttgtacctcagctgagctgttcctggggtgagccctcgttcatggtgacaaagtcacatagatcttagaccctgggaggatactagcatcttatgcatacacaaactgaggctcagagatgttaagtggcttgcccaagatcgcacagtggttagagatgggcctgtgaccctgtcttctgccatcgggacagattttcactgtctggaggcaggtggaaaccgggtgggctcctactttgtaagcacaggacagtgccctgtctgtgtacatgggacagtcacaaacggaaatggcctggtcacaccttagtgtcaaggagcctccagcaggagtgaaacggacctctcacacagaccccaggctgcatctcatcctgccccaaccgctgggcttgtgctggaccaccactgcttccaaggacccgtgaaaacccggctgccgggatgcagagaggcagactttcatgaacgtttgcagcaaagggcagttcccaccgagcctgtgttgctgtggcactgtgtggtgcacaccccaccccggaaaccctccagtgtcctggtgtctgaccccaaatggacagggccttttggcccccaggggccacttctgactcctccccttcacaacgatgctgagggagcaggagaactggggcccggctgctgtgcgtgcccccttcccttcattgccccaaagcctgcagtccagccccaggctcgggagctgctgcctcttccctgggatgtggaaggcacctgcatccccgcccagctgctgccacttgcctgcctccatcagcagctttgttttattttgtctgtgtgttttttgagatggagtcttgctctgtcgcccaggctggagtgcagtggcgtgatctcggctcacttcaacctccgcctcccaggttcaagcgattcttctgcctcagcctcctcagtagctgggattacaggcacccgccaccatgcctggctaatttttgtatttttagtagagatggggtttcaccatgttggccaggctagtctagaactcctgacctcaggtgatctgcccacctcagcctcccaaagtgctgggattacaggtgtgagccactgtgcccagcctccaccagcagcttttgaaatccagaaatttccaggggagggcactgtggtgggtggggcccagcgctgtgtccagctcgaggcctggctgcactgccacctcctttggtgcccacccctgtgtcttgccagcagctgctgcacattgggcttcggggatgcaggactccagcacccccagctcagcctgcttcctggaccaggaaccccagccgaggagggggcatttgtatctctgccatccctgctggcaactggtcctgagaaagcccagatggttggtgcagagggggcgtcaggggctgcaccaccctaagaacatgacatgtcaccccccagccccccgcaacacacacacacaggttcacacctcacacccctgatcttggcggctccctggagcacagcacccgcttcccgtgtctgtggttggcttatgacgccccagccactctaaccgggttaaggggagcccagagcctggggccggataggaaaaagcccagagaagtcaggggatggtcagtcccctgaagctgcccctgggggttcttgatcttctgaactgagttcgaggcaagccctggaggggcgaggaggagaaagaaacagctctctgggccaggacccgctgttcgtgggatgtctggggagctgtgtgaacccacaggccgttttgtttctctccatcagcagctgtgggctgaagcgtgtaccggcggagtgggttgagatcgtgtctgcgcccacttgccaccagctccggcctctggggaggtggtgctgagagggagggagagtggctcctgtttggctcctggagacagacagctgggtgtcccaccctcagagtccccagccccctctcccctctgctaactctgccggtggagctcacgccgcagctcatgccaaccctgcccttctgttttgcctctcatgactctccccaaattctgcccccaggcccccagccagccttcttgccactttcctgccctttactcttgccccttctacctcttgccagggcagcgtcactggctacgtgaggcccagcttggggatgcatggggaggtgtaagaacagctgtgccatgagctgtccttccgggcctctggggctggagaaaccccggggtcagcagtaccacgggttttgctggggattgcacagtgggtgaggctcagcttcctctttgcagctttctaaaaatgccctggttcccagcagggccacaggcagggaaaatgagtttcagtttctgtggcaagggagctggggagagaagcagtttccttgtccccagccctcaccctagcatcctgtgattcagccgcgaagacgtggccccaagcctcccaccgccctccttctgtcctgactgcccactcccagggacaccaggtgacgcctcgcccacccgcggctccggagccaggctggaagcagcttcccgcccagggggtggtttccccacatcctgtcttcagatggcttgagccccctaaacttcctggtcatatccagtggataataatggtctccctctttcctgtctggaggggagggggctgcttacttcttatccaagggcctgtcccgtcccacccctgtgtccccatttctggccacacgcaggctcagcccttgcatcaagcctctgcctgtttccctctgggctgcacctgtcacgctctccctgccctgccccataaagcccatagagcccagggcttgtggggactgcacccttcattagcaagactcagagcttctagaaacccacttgtgtgggggtggggagtgcagggagattggtggcaccaggtggagagagggaactgcacctgggggagttgggaggggcagtgggctgggcccgcgtggaggagtgtggcttgtacagtccgcatggcggggggacccttgtaccctgcctggactggctggtagagctgttggggacctccctgggggtggccttgcttacccagctgtgcggaacaggcttggttgggagtgcctggcctcaccctttgtggggaaaccagattctctgggcagcagtggtaaatggtgtctgagtctgtgtttcgttggatgtgtctgaggtccgctgctgccagctgggttatgctgtctccaaagctatctgcagtgggggaggccctgagcctgggcaggggagggtacagaggcctcaacccatgggacctgggggtgatctgaactctgcacttcactttttttcaggatttcccccgccccaccctaaaggaggaggaaatagagtctgtcccaccctaagccccagtccctctccccaggtctctttggcatctcccagctgggctggggctgaaggcccttctctggggttggccacagtgaggccaggatctggctgggcaggtggcagtgttccgcctgtgggctgggtgcggaggcgggcctgggggtcttagagagagagcggcggatgtgactgcgggccaggaggaagcctggtcccaggatgtcaccatttcccctgcagtgagcaagcatctctagggctcggagataagtgctgggtggggtagctccagctctccagcgcttttttctgtctggttcctgccatctggacttgagccatgaggaaggccagagtgggtctgacagtccccactcctttccccgctgagccccaaggaaggggctgggcctttgcacccccaccccaacttctgcacgagttggaggcagttgatctcaatggtggaaagtggctggtgcaaagtcatgcttccatactccatgtttaggcttcatgggtgtcaaagctgggccgtgaccttgtcccattccctcagagaagggaactgaggccagagggtggagctgctctcaggccgctgcccaggcctcttgtgctctgcggttcagatggcactcccgatgccaggctcctgcccaggaagacatgcccacccgccctggccctgtctctgctgtctggtgtcaggccacctctcttcgggacccccccccaactgattgccctggggctgaccaggctctcctctccctcagtgttgggttttgggagcctctctcatcaggaggttggcacagatgccagccatgcagcggatcctgggcaggggtctcagctgggatggcctggccttgggacagggaggctggctgggcagaaccctagaaccaaaagcggtgcctgtggtgggctagggagctaggtggggagtctagtggggagtctagtggggaggtccactagacactcgttctggcacagcatgcagcgtcctccatcctggccctgctgtgggtacggagccagcagggcaggagctctcagtggagccctccaaagagggctgcttcctggaccagctgcaggatgagggagaccccttctgtccagggctgacataggctgaccaccgccagccccaccctctcactagcttcccattcagttagccattgatgagggctcactgggtgcaggatcctgggctgcccggggttgggtaggggactcctacatgtaggtaaatccgcgagatgctggagagagcaggcaataaagtggttgattctctctggaggtgacattttactttcctagtagggcttggccaggcaggcaaggtggagcctggtgtgccaggcgcagcgcttcagatgagaggaggtgagagcttggggatggcacagggaagtgttttgtctggtgagggtgtggcagggagggcaggcctgaagggacctccagggaggtgtgatcagatctgggttccagaaagatcctacctgcttggcgaccttaactgagctggagtctggaggccccacccttgcacccagctgcttccactgcttgcctcccatcccccagtgccagttccccagggcagtgccctccccatgccctcttggtgtaccctggtcccaaaggaggccaagctatgaacttttcttgcagaggtcccaggtgaggctgttgtcctggagctgtccccagagcaggcttaggatgaggggacctagccacagcttcaaccgagtggggtcccggtgtggctgccagggctccttggcaccaacccagcccagtgggttgatctctgaggacctcgtcatactcagccgggcagtctgccctggggggtggggtcaggactccccagcacttcgggatggaaggaggcgaagccagcgctgctggactagccttaaagaagcgggagacatcctagctccgcctcaagatttctcctctgcacccagcattctgctccccaaatgtcccaaatatgcagggggtcaaggaacattgctcagtggaatcaatggggagcgtgggctactccccagcctctggtttgccccatagcagccccttgggcaccgctggggacccccaggcctctgaggagcttggtttggaaagcgctggaatgctggaccaagttccctctctggctccctgagagggggtcttctagccccagtcttagggcaagaggagcccgtcccctaggagcctccaggccctggagccagacatcgggcgtcctagctacaccctttcctggctatgtgagcttgggcaagttaccaaacccctctgagcctccattcaccatctacagaatggaagagacgctaatgtcaccctggaaggtgttttgaagggtaatgtgtgtaaagggccaaacaaggccccgcacagttaaggacttaaatcctgcccggccccgggagggcttccggcatcttggggttcccctcaaaggatggcctgggcaggacttcttaaaaacaaacaggcggctgggcgcggtggctcacgcctgtaatcccagcactttgggaggccgaggcaggcggatcacgaggtcaggggatcgagaccatcctggctaacatggtgaaaccccgtctctactaaaagtataaaaaattagccgggtgtggtggcgggcgtctgtagtcccagctcctccggaggctgaggcaggagaatggcgtgaacccgggaggcggtgcttgaagggagctgagatcatgccactgcactccagcctgggctacagagcgagactccatctcaaaaaaaaaaaaaaaacaggaatgcccctgggtttcgtgctttaaaatggttgattttatgttgtgtgacttttaagttcaataaattaccaatcaaagcaacaaaacacttccagatcatttgaactttgccttaagtatcagaaggcagttagtaattcctggactttgaatgttaaatatgtggggttcttttgttttgttttgttttgtttcgagacggagtcttgctctgtcacccaggctggagtgcagtggcgcgatctcggctcactgcaacctccatctcccgggttcaagtaactctcctgcctcagcctcccgagtagctgggattacaggcccaccacacccagctaattattttgttgtttttggttttggttttggttgtgagacagagtctcacactgtcatctgggctggagtacaatggcgcgatcttggctcactgcaacctccgcctcccatgtttaagtgattctcctgcctcagcctcctgagtagctgggattacaggcgcccgccaccacacccggctacttttttgtatttttagtagagatggggtttcactatgttggccagactggtctcgaactcctgacctcgtgatccaccctcctcagcctcccaaagtgctgggattacaggcgtgagccactgcacccagccccggctaatttttgtattcttagtagagacagggtttcaccatgttggccaggctggtctcgaactcttgacctcatgattcccccaccttggcctcccaaagtgctgggattacaggtgtgagcgcctgcaccctgcccaaaaatatgtggttttgtttgttttttgaggcagagtctccctctgtcgcccaggctggagtgtaatggcacaatctcggctcactgcaacctccgcctcccaggttcaagcaattctcctgcctcaacctcccgagtagctgggactaaaggtgtgcaccaccatacccagctaacttttgtatttttagtagagatgggtttttaccatgttggccaggccgatctcgaactcctgacctcaggtgatccacctgcctcagcctcccaaaatgctgggattacaggtgtgagctactgcccctggccgaaagttaaatgtttctgttctgttcaagtaatattgagaaaaataacaggggccatcttgactctaatgttctgctccaatcaggttcccagaccagaggactgttgttaggtgattggctgtgaacaccctgaggccagtgcccctcgctgcttggcactcggagatgcctgattagcacctttaatcccttaccagtgaggcaggtggaattggccccattttacagatggggagactgaggtgaggaaggttaaagcactcagtggtgggcatgccccctggagccggccctcctttcttccagctgtgagtacccaggaagctgcaccgtgtggcctggagctgtctatctgtccttccagccacctgtctgtccagccacccttccacagactgaggcttgacaccggagcatctgtacagagcaaggagaagacaagaacatgctctaaagcccttcacagcaagacccaggaagccgcgggcaaactcagactcgaaggtaggaagctgggcggccgggtggctggacccagggcgctggctgctgtgcccacgtccagatacctcctgcggggcccacgctctctgtctgaacagcggtggacagtgaatgaagaaagtcaattcagggagcgagagggaggaataagggcagggaagggacgggcgcggtggctcacgcctgtaatcccagcattttgggaggccgaggtgagtggatcacctgaggtcaggagttcgagactggcctggccaacatggcaaaaccccatctctactaaaaatacaaaaaatttagctgggcgtggtggtgcgcgcctgtagtcccagctacttgggaggctgaggcaggagaatcgctcgaacctgggaggcagaggttgcagtgagccaagatcatgccactgcactccagcctgggctgcagagtgagactacatctcaaaaaaaaaaaaaatttgccaggcatgctggctcacgcctgtaatccaagcactttgggaggccaaggcgggtggaggccaggagtttgagaccagcctgaccaacatggagaaacccagtctctactaaaaaatacaaaattagctgggcatggcggtgcatgcctgtaatcccaactactcgggaggctgaggcaggagaattgcttgaacccaggaggcggaggctgcagtgagctcagatcgtgccactgcactccagcctgggcaacaagaatgaaactcagtctcaaaaaaaaaaaaaaaaaaaaaaaggcaggaagcgaggtgggaccggcactgctcaaggtggggcaggagggcacttgaactgcaaccaggaggctgagaagagccagcccctcctctgtgtgatggtctgggacagagtgactggctcggacagaggcccaacattatggagcacctgcttcattgagagagaattcacacaccagtcgattcacccatttaaagtgtaccatcagtgtttttatttatttatttatattttgagacagggtctcactctgttacccaggctggagtacagtggcgcgatcacggttcactgcagcctcgaccttcctagctcaagccatccttctgcctcagcctcctgagtagctgggactatatgcacgcaccaccatatctggctaattttttaatttttttatacagatgggatctcactatgttgctcaggctggtcttgaactcctgggctcaagtgatcttcctgcctcagtctctcaaattgctgggattacaggcatgaaccaccgctcccaaccttcagtgattttgatatattcacagaggctgggcacagtggctcacacctgtaatctcagcactttctgagaggccgaagcaaacttgaggtaaggagttcgagactagcctggccaacatggtgaaaccccatctctactaaagatacaaacattacccaggcatggtggcttgcgcctgtagtcccagctactcgggagactgaggcaggagaatcgcttgaacctgggaagtggaggttggcagtgagccaaaatcgcaccactgcgctctagcctgggtgacagagcaagactctgtctcaaaaactatatgtgtgtgtgtgtgtgtgtgtgtgtgtgtgtgtgtgtgtacatatatatacatattcacagaattgtgccaccatcaccacagtttcagattgctttcatcaccccctaaagaaagcctgcaccctttagctgtcaccccctgcccagtccccaccttcccagtcctaagaaccactaccctgcttctgtctatagatttccctcttctattccgagctttcatatgaatggactcatgcagaggtggccatcgtgactggctcctgtccctggacacaatgttctcaaagctcgtccacgttgtagctttgttaggacttccttccttttgtggctgaaggatgctccattgtgtggctcaaccacattttatatttgtgccttcatctgctgacgggcgcttgtgctgttttcctgctccggctctgcagagccgtgctgccgggcacttcctgtccaggtttctgtgtggacacagtgcttcagtgtgtgaagccatctgctcattttttgttgttgtttgagacggagtctcactctgtcgcccaggctggaggcctggagtgcagtggcgagatctcggctcactgtaaccacaccccccgtcctgggttcaagtgattctcctgcctcagtctcccgaatagctgggactacagttgcccaccaccacacccagctcttttttttttttttttttttttgagacagagttttgctgttgttgcccaggctggagtgcaatggcgagatttcggctcaccgctaactccaccttccaggttcaagcgattctcctgcctcagcctcccgagtagctgggattacagggatgcaccaccatgcctggctaatgttttttgtatttttagtagagataggctttctccatgttggtcaggctggtctcgaactcccgacctcaggtgatccgcccgcctcggcctcccaaaatgctgggattacaggcatgagccaccgcgcccagcctaatttttgtatttttagtagagatggggtttcaccatgttggccaggctggtcttgaactcctggccttaggtgatccgcccacctcagcctcccaaaatgctgagattacaggcgtgagccactgtgcccggtgacatcatccactcatttgctcctccagacgcttctctggggaggaaccgttactctcccccttgtgcaggtcaggacttgggtgatgagttgtcaggtgactaacccgacagcaaatgcaagaccattggcccagtatgcgctgccggctccattgcttttgatcatgaaccccacccccagcagagcttggccagtttgagacaatgaggggcccaggaaagctgggtcaggggtaagcaagggcacaggaagagacgaagagaggtcctggaagtcccagtgagacgtttggactttgggtgagaacaggaaatcctgggagagagttgagcagggaagcaacaggtgtgatctatgcttttgggaggtgaccccagctgcggtgcggagaatgatcagtctcagggggcttgaggcagcaggtagaggaattgagagagtggagtgagcctccaggtgaggagatggtggaggtgaggtggagatggtggaggtgaggtagagatggaggaggaggacaggttcagatggctgctgtctcgccgacccgtgcatgccacgcctcagcccacacacgcccttggctgaagggctcccagggagatgggtatggagtccctggcttcgtacaaggagaggaaaaacaaaacttgcccaggaaccttgggatgtgaaggagaggaaacagctgggggggtttatttttatttttatttttatttttgagacgaagtttcgctcttgttgcccaggctggagtgcaatggtgcaatctcggctcactgcaacctctgcctcccgggttcaagcaattctcctacctcagcctcccgagtagctgagattacaggcatgcgccaccacacccagctaattttttgtatttttagtagagacggggtttctccatgttggtcatgctggtctcgaactcccgacctcaggtgatctgcccaccttggcctcccaaagtgctgggagtacaggcatgagccaccgcgcccggccacagctgggggttttaacaagaagacggtcatggggcagagcaagagacgaaacgaagagaatgaaacaggcagagggtgttaattctggtggagtcagaggggaactggggactggtggcacacgcacaggaaagccccagatggggtactgggcaacagccactgaaatttgggatgtacttactcttcaacccagccattctgcttccagaacttggtcttgtaatagttaaacaagcacacgcggtgtatgcaagggtgttagttgcaacatcagacccatgtctcaaattccggaaacatcctaaataaccagcagtctggacttaagtaaatcttggtgcattccacttatgaaatctttgcattcatcaaaaaagacaagaggcctagggccgggtgtggtggctgaaacctgtaatcccagcactttgggaggccgaggcaggtggatcacctgaggtcaggagttcgagaccagcctgaccaacatggagaaaccccatctctactaaaaatacaaaattagctgggcgtggtggcgcatgcccgtaatccgagcttcttgggaggctgaggcaggagaatcacttgaacctgggaggtggaggttgcggtgagccgagatcgcgccactgcactccaatctgggtgacagaatgagaccccatcacaaaaaaaaagaaaaaagaaaaaaagtaggtctgtccgtatgtgttgacagggaaagatgtctacaatgcaggtaaaatgatagagtgtgggctgggcttggtggctcacgcccataaccccggctacttgggaggctgaggcaagagaattgcttgaacctgggaggtggagggtgcaatgagattggctcacagcaatctcttcctctcgggttcaagtgattctcctgcctcagcctcccgagtagctggaactacaggaatgaggcactatgcctggctaatttttgtattttagtagagatggtgtttcactgtgttggccaggctagtctcgaactcctgaccttaagtgatccatccaccttggtctcccaaagtgttgggattgtacgtgtaagccaccacacacagctgtgtgattttttttttttttcaatgagcatatgccacttttattgttaaacagtgttctcactatgggggagaaaagtgccagacaggtggcagtttcagttatcttttttttttgagacattttctcactctgtcgcccaggctggagtgcagtggcatgatcttggctcactgcaacctctgcctcctgggttcaagcaattctcgtgcctcagcctcccaagtagctgggattataggcatgcgccaccacacctggctaattttgtatttttagtagagacagggttttaccatgttggccaggctggtctcaaactcctgacctcaggtgatccacctacctcggcctcccaaagtgctgggattacaggcatgagccacgcacccagccagttttagttatctttgaaaaatgaactggggctgggcacagtgagcttgcacctgtaatcccagcacttgggaggccaaggcaggcagatggcttaagcccaggagttccagaccagcctggctaacatggagagacccccacctctacagaaaaaagacaagaaaaataaactgggtggccttgggggacagggaccagcacagtaggtttctcatctctcggcccacctcggcctccccaagtgctggtattacaggtgtgagccaccgtccctggcctgcatcttcatgctcttttcagggtttggttcttgcctcaagcggagagatcagaaattgaatgaggtagtaagttgaggacctcccagacccatatggtccgggatgcaaatgatggtcagaaatagacctcactccaaccactgggcctgaggttcagcctggttcaggctgggtttagtccccagggatggtttgtttttggttttgtgtgtgtgtgtgtgtgtgtgtgtgtgtgtgtgtgtgtgtgtgtgtgtgttttcagacagagtcttgctctgtcgccaggctggagtgcagtggcgcgatctcggcttactataaccgctgcctcctgggttcaagccatcctgcctcagcctcccgagtagctgggattacaggcacgtgccaccacgcctagctaattttttgtatttttagtagagacggggtttcaccatgttggccaggatggtctcgatctcctgacctcgtgatccccccacctcggcctcccaaagtgctgggattacaggcgtgagccaccgcgcccagccgcccagagatgtttgaaccaactttaggcaagttggttcttggtctgggctgcgtgccctggcgtcagggtcctgacactgcgccaccccgcaccgcccaccgctgctctcccggtctccattccagccctcccgcctcctgcccacaatggcctctgctgacaagaatggcgggagcgtgtcctctgtgtccagcagccgcctgcagagccggaagccacccaacc

SEQ ID NO: 13742 - DNA, 734 bp, Homo sapiens
gacttggggccgcagggaggtgagcgcggggcgacgagcggggcaggactcacggccgcccagccgcaggcgccggaagggtcccgaggttgtgcccgagcctgccctggagcggtggtgcgcggccaggaagggtgcccagtgcccggtgcccgccctgcggagcgcctgggtcccacgtgggctcggctggaggcccgggctggctcagacggcgccggcggggccgctggacccggtctgctggcccctagggctcggctcggacaggacgcctaaggggtccctgggcgacggggcgccagatgtaggggcaagacgattgggcagagatttaaacctccggaggaagagaggagactgcgcagggcagtcccgcctgcgtcccagaagtgcctgcagttcagacccttctctcccctccactttctcccggctgtgagtacccaggaagctgcaccgtgtggcctggagctgtctatctgtccttccagccacctgtctgtccagccacccttccacagactgaggcttgacaccggagcatctgtacagagcaaggagaagacaagaacatgctctaaagcccttcacagcaagacccaggaagccgcgggcaaactcagactcgaagccctcccgcctcctgcccacaatggcctctgctgacaagaatggcgggagcgtgtcctctgtgtccagcagccgcctgcagagccggaagccacccaacc

SEQ ID NO: 13743 - DNA, 6740 bp, Homo sapiens
aaaaataacaggggccatcttgactctaatgttctgctccaatcaggttcccagaccagaggactgttgttaggtgattggctgtgaacaccctgaggccagtgcccctcgctgcttggcactcggagatgcctgattagcacctttaatcccttaccagtgaggcaggtggaattggccccattttacagatggggagactgaggtgaggaaggttaaagcactcagtggtgggcatgccccctggagccggccctcctttcttccagctgtgagtacccaggaagctgcaccgtgtggcctggagctgtctatctgtccttccagccacctgtctgtccagccacccttccacagactgaggcttgacaccggagcatctgtacagagcaaggagaagacaagaacatgctctaaagcccttcacagcaagacccaggaagccgcgggcaaactcagactcgaaggtaggaagctgggcggccgggtggctggacccagggcgctggctgctgtgcccacgtccagatacctcctgcggggcccacgctctctgtctgaacagcggtggacagtgaatgaagaaagtcaattcagggagcgagagggaggaataagggcagggaagggacgggcgcggtggctcacgcctgtaatcccagcattttgggaggccgaggtgagtggatcacctgaggtcaggagttcgagactggcctggccaacatggcaaaaccccatctctactaaaaatacaaaaaatttagctgggcgtggtggtgcgcgcctgtagtcccagctacttgggaggctgaggcaggagaatcgctcgaacctgggaggcagaggttgcagtgagccaagatcatgccactgcactccagcctgggctgcagagtgagactacatctcaaaaaaaaaaaaaatttgccaggcatgctggctcacgcctgtaatccaagcactttgggaggccaaggcgggtggaggccaggagtttgagaccagcctgaccaacatggagaaacccagtctctactaaaaaatacaaaattagctgggcatggcggtgcatgcctgtaatcccaactactcgggaggctgaggcaggagaattgcttgaacccaggaggcggaggctgcagtgagctcagatcgtgccactgcactccagcctgggcaacaagaatgaaactcagtctcaaaaaaaaaaaaaaaaaaaaaaaggcaggaagcgaggtgggaccggcactgctcaaggtggggcaggagggcacttgaactgcaaccaggaggctgagaagagccagcccctcctctgtgtgatggtctgggacagagtgactggctcggacagaggcccaacattatggagcacctgcttcattgagagagaattcacacaccagtcgattcacccatttaaagtgtaccatcagtgtttttatttatttatttatattttgagacagggtctcactctgttacccaggctggagtacagtggcgcgatcacggttcactgcagcctcgaccttcctagctcaagccatccttctgcctcagcctcctgagtagctgggactatatgcacgcaccaccatatctggctaattttttaatttttttatacagatgggatctcactatgttgctcaggctggtcttgaactcctgggctcaagtgatcttcctgcctcagtctctcaaattgctgggattacaggcatgaaccaccgctcccaaccttcagtgattttgatatattcacagaggctgggcacagtggctcacacctgtaatctcagcactttctgagaggccgaagcaaacttgaggtaaggagttcgagactagcctggccaacatggtgaaaccccatctctactaaagatacaaacattacccaggcatggtggcttgcgcctgtagtcccagctactcgggagactgaggcaggagaatcgcttgaacctgggaagtggaggttggcagtgagccaaaatcgcaccactgcgctctagcctgggtgacagagcaagactctgtctcaaaaactatatgtgtgtgtgtgtgtgtgtgtgtgtgtgtgtgtgtgtgtacatatatatacatattcacagaattgtgccaccatcaccacagtttcagattgctttcatcaccccctaaagaaagcctgcaccctttagctgtcaccccctgcccagtccccaccttcccagtcctaagaaccactaccctgcttctgtctatagatttccctcttctattccgagctttcatatgaatggactcatgcagaggtggccatcgtgactggctcctgtccctggacacaatgttctcaaagctcgtccacgttgtagctttgttaggacttccttccttttgtggctgaaggatgctccattgtgtggctcaaccacattttatatttgtgccttcatctgctgacgggcgcttgtgctgttttcctgctccggctctgcagagccgtgctgccgggcacttcctgtccaggtttctgtgtggacacagtgcttcagtgtgtgaagccatctgctcattttttgttgttgtttgagacggagtctcactctgtcgcccaggctggaggcctggagtgcagtggcgagatctcggctcactgtaaccacaccccccgtcctgggttcaagtgattctcctgcctcagtctcccgaatagctgggactacagttgcccaccaccacacccagctcttttttttttttttttttttttgagacagagttttgctgttgttgcccaggctggagtgcaatggcgagatttcggctcaccgctaactccaccttccaggttcaagcgattctcctgcctcagcctcccgagtagctgggattacagggatgcaccaccatgcctggctaatgttttttgtatttttagtagagataggctttctccatgttggtcaggctggtctcgaactcccgacctcaggtgatccgcccgcctcggcctcccaaaatgctgggattacaggcatgagccaccgcgcccagcctaatttttgtatttttagtagagatggggtttcaccatgttggccaggctggtcttgaactcctggccttaggtgatccgcccacctcagcctcccaaaatgctgagattacaggcgtgagccactgtgcccggtgacatcatccactcatttgctcctccagacgcttctctggggaggaaccgttactctcccccttgtgcaggtcaggacttgggtgatgagttgtcaggtgactaacccgacagcaaatgcaagaccattggcccagtatgcgctgccggctccattgcttttgatcatgaaccccacccccagcagagcttggccagtttgagacaatgaggggcccaggaaagctgggtcaggggtaagcaagggcacaggaagagacgaagagaggtcctggaagtcccagtgagacgtttggactttgggtgagaacaggaaatcctgggagagagttgagcagggaagcaacaggtgtgatctatgcttttgggaggtgaccccagctgcggtgcggagaatgatcagtctcagggggcttgaggcagcaggtagaggaattgagagagtggagtgagcctccaggtgaggagatggtggaggtgaggtggagatggtggaggtgaggtagagatggaggaggaggacaggttcagatggctgctgtctcgccgacccgtgcatgccacgcctcagcccacacacgcccttggctgaagggctcccagggagatgggtatggagtccctggcttcgtacaaggagaggaaaaacaaaacttgcccaggaaccttgggatgtgaaggagaggaaacagctgggggggtttatttttatttttatttttatttttgagacgaagtttcgctcttgttgcccaggctggagtgcaatggtgcaatctcggctcactgcaacctctgcctcccgggttcaagcaattctcctacctcagcctcccgagtagctgagattacaggcatgcgccaccacacccagctaattttttgtatttttagtagagacggggtttctccatgttggtcatgctggtctcgaactcccgacctcaggtgatctgcccaccttggcctcccaaagtgctgggagtacaggcatgagccaccgcgcccggccacagctgggggttttaacaagaagacggtcatggggcagagcaagagacgaaacgaagagaatgaaacaggcagagggtgttaattctggtggagtcagaggggaactggggactggtggcacacgcacaggaaagccccagatggggtactgggcaacagccactgaaatttgggatgtacttactcttcaacccagccattctgcttccagaacttggtcttgtaatagttaaacaagcacacgcggtgtatgcaagggtgttagttgcaacatcagacccatgtctcaaattccggaaacatcctaaataaccagcagtctggacttaagtaaatcttggtgcattccacttatgaaatctttgcattcatcaaaaaagacaagaggcctagggccgggtgtggtggctgaaacctgtaatcccagcactttgggaggccgaggcaggtggatcacctgaggtcaggagttcgagaccagcctgaccaacatggagaaaccccatctctactaaaaatacaaaattagctgggcgtggtggcgcatgcccgtaatccgagcttcttgggaggctgaggcaggagaatcacttgaacctgggaggtggaggttgcggtgagccgagatcgcgccactgcactccaatctgggtgacagaatgagaccccatcacaaaaaaaaagaaaaaagaaaaaaagtaggtctgtccgtatgtgttgacagggaaagatgtctacaatgcaggtaaaatgatagagtgtgggctgggcttggtggctcacgcccataaccccggctacttgggaggctgaggcaagagaattgcttgaacctgggaggtggagggtgcaatgagattggctcacagcaatctcttcctctcgggttcaagtgattctcctgcctcagcctcccgagtagctggaactacaggaatgaggcactatgcctggctaatttttgtattttagtagagatggtgtttcactgtgttggccaggctagtctcgaactcctgaccttaagtgatccatccaccttggtctcccaaagtgttgggattgtacgtgtaagccaccacacacagctgtgtgattttttttttttttcaatgagcatatgccacttttattgttaaacagtgttctcactatgggggagaaaagtgccagacaggtggcagtttcagttatcttttttttttgagacattttctcactctgtcgcccaggctggagtgcagtggcatgatcttggctcactgcaacctctgcctcctgggttcaagcaattctcgtgcctcagcctcccaagtagctgggattataggcatgcgccaccacacctggctaattttgtatttttagtagagacagggttttaccatgttggccaggctggtctcaaactcctgacctcaggtgatccacctacctcggcctcccaaagtgctgggattacaggcatgagccacgcacccagccagttttagttatctttgaaaaatgaactggggctgggcacagtgagcttgcacctgtaatcccagcacttgggaggccaaggcaggcagatggcttaagcccaggagttccagaccagcctggctaacatggagagacccccacctctacagaaaaaagacaagaaaaataaactgggtggccttgggggacagggaccagcacagtaggtttctcatctctcggcccacctcggcctccccaagtgctggtattacaggtgtgagccaccgtccctggcctgcatcttcatgctcttttcagggtttggttcttgcctcaagcggagagatcagaaattgaatgaggtagtaagttgaggacctcccagacccatatggtccgggatgcaaatgatggtcagaaatagacctcactccaaccactgggcctgaggttcagcctggttcaggctgggtttagtccccagggatggtttgtttttggttttgtgtgtgtgtgtgtgtgtgtgtgtgtgtgtgtgtgtgtgtgtgtgtgtgttttcagacagagtcttgctctgtcgccaggctggagtgcagtggcgcgatctcggcttactataaccgctgcctcctgggttcaagccatcctgcctcagcctcccgagtagctgggattacaggcacgtgccaccacgcctagctaattttttgtatttttagtagagacggggtttcaccatgttggccaggatggtctcgatctcctgacctcgtgatccccccacctcggcctcccaaagtgctgggattacaggcgtgagccaccgcgcccagccgcccagagatgtttgaaccaactttaggcaagttggttcttggtctgggctgcgtgccctggcgtcagggtcctgacactgcgccaccccgcaccgcccaccgctgctctcccggtctccattccagccctcccgcctcctgcccacaatggcctctgctgacaagaatggcgggagcgtgtcctctgtgtccagcagccgcctgcagagccggaagccacccaacctctccat

SEQ ID NO: 13744 - DNA, 574 bp, Homo sapiens
aaaaataacaggggccatcttgactctaatgttctgctccaatcaggttcccagaccagaggactgttgttaggtgattggctgtgaacaccctgaggccagtgcccctcgctgcttggcactcggagatgcctgattagcacctttaatcccttaccagtgaggcaggtggaattggccccattttacagatggggagactgaggtgaggaaggttaaagcactcagtggtgggcatgccccctggagccggccctcctttcttccagctgtgagtacccaggaagctgcaccgtgtggcctggagctgtctatctgtccttccagccacctgtctgtccagccacccttccacagactgaggcttgacaccggagcatctgtacagagcaaggagaagacaagaacatgctctaaagcccttcacagcaagacccaggaagccgcgggcaaactcagactcgaagccctcccgcctcctgcccacaatggcctctgctgacaagaatggcgggagcgtgtcctctgtgtccagcagccgcctgcagagccggaagccacccaacctctccat

SEQ ID NO: 13745 - DNA, 11771 bp, Homo sapiens
accctagcatcctgtgattcagccgcgaagacgtggccccaagcctcccaccgccctccttctgtcctgactgcccactcccagggacaccaggtgacgcctcgcccacccgcggctccggagccaggctggaagcagcttcccgcccagggggtggtttccccacatcctgtcttcagatggcttgagccccctaaacttcctggtcatatccagtggataataatggtctccctctttcctgtctggaggggagggggctgcttacttcttatccaagggcctgtcccgtcccacccctgtgtccccatttctggccacacgcaggctcagcccttgcatcaagcctctgcctgtttccctctgggctgcacctgtcacgctctccctgccctgccccataaagcccatagagcccagggcttgtggggactgcacccttcattagcaagactcagagcttctagaaacccacttgtgtgggggtggggagtgcagggagattggtggcaccaggtggagagagggaactgcacctgggggagttgggaggggcagtgggctgggcccgcgtggaggagtgtggcttgtacagtccgcatggcggggggacccttgtaccctgcctggactggctggtagagctgttggggacctccctgggggtggccttgcttacccagctgtgcggaacaggcttggttgggagtgcctggcctcaccctttgtggggaaaccagattctctgggcagcagtggtaaatggtgtctgagtctgtgtttcgttggatgtgtctgaggtccgctgctgccagctgggttatgctgtctccaaagctatctgcagtgggggaggccctgagcctgggcaggggagggtacagaggcctcaacccatgggacctgggggtgatctgaactctgcacttcactttttttcaggatttcccccgccccaccctaaaggaggaggaaatagagtctgtcccaccctaagccccagtccctctccccaggtctctttggcatctcccagctgggctggggctgaaggcccttctctggggttggccacagtgaggccaggatctggctgggcaggtggcagtgttccgcctgtgggctgggtgcggaggcgggcctgggggtcttagagagagagcggcggatgtgactgcgggccaggaggaagcctggtcccaggatgtcaccatttcccctgcagtgagcaagcatctctagggctcggagataagtgctgggtggggtagctccagctctccagcgcttttttctgtctggttcctgccatctggacttgagccatgaggaaggccagagtgggtctgacagtccccactcctttccccgctgagccccaaggaaggggctgggcctttgcacccccaccccaacttctgcacgagttggaggcagttgatctcaatggtggaaagtggctggtgcaaagtcatgcttccatactccatgtttaggcttcatgggtgtcaaagctgggccgtgaccttgtcccattccctcagagaagggaactgaggccagagggtggagctgctctcaggccgctgcccaggcctcttgtgctctgcggttcagatggcactcccgatgccaggctcctgcccaggaagacatgcccacccgccctggccctgtctctgctgtctggtgtcaggccacctctcttcgggacccccccccaactgattgccctggggctgaccaggctctcctctccctcagtgttgggttttgggagcctctctcatcaggaggttggcacagatgccagccatgcagcggatcctgggcaggggtctcagctgggatggcctggccttgggacagggaggctggctgggcagaaccctagaaccaaaagcggtgcctgtggtgggctagggagctaggtggggagtctagtggggagtctagtggggaggtccactagacactcgttctggcacagcatgcagcgtcctccatcctggccctgctgtgggtacggagccagcagggcaggagctctcagtggagccctccaaagagggctgcttcctggaccagctgcaggatgagggagaccccttctgtccagggctgacataggctgaccaccgccagccccaccctctcactagcttcccattcagttagccattgatgagggctcactgggtgcaggatcctgggctgcccggggttgggtaggggactcctacatgtaggtaaatccgcgagatgctggagagagcaggcaataaagtggttgattctctctggaggtgacattttactttcctagtagggcttggccaggcaggcaaggtggagcctggtgtgccaggcgcagcgcttcagatgagaggaggtgagagcttggggatggcacagggaagtgttttgtctggtgagggtgtggcagggagggcaggcctgaagggacctccagggaggtgtgatcagatctgggttccagaaagatcctacctgcttggcgaccttaactgagctggagtctggaggccccacccttgcacccagctgcttccactgcttgcctcccatcccccagtgccagttccccagggcagtgccctccccatgccctcttggtgtaccctggtcccaaaggaggccaagctatgaacttttcttgcagaggtcccaggtgaggctgttgtcctggagctgtccccagagcaggcttaggatgaggggacctagccacagcttcaaccgagtggggtcccggtgtggctgccagggctccttggcaccaacccagcccagtgggttgatctctgaggacctcgtcatactcagccgggcagtctgccctggggggtggggtcaggactccccagcacttcgggatggaaggaggcgaagccagcgctgctggactagccttaaagaagcgggagacatcctagctccgcctcaagatttctcctctgcacccagcattctgctccccaaatgtcccaaatatgcagggggtcaaggaacattgctcagtggaatcaatggggagcgtgggctactccccagcctctggtttgccccatagcagccccttgggcaccgctggggacccccaggcctctgaggagcttggtttggaaagcgctggaatgctggaccaagttccctctctggctccctgagagggggtcttctagccccagtcttagggcaagaggagcccgtcccctaggagcctccaggccctggagccagacatcgggcgtcctagctacaccctttcctggctatgtgagcttgggcaagttaccaaacccctctgagcctccattcaccatctacagaatggaagagacgctaatgtcaccctggaaggtgttttgaagggtaatgtgtgtaaagggccaaacaaggccccgcacagttaaggacttaaatcctgcccggccccgggagggcttccggcatcttggggttcccctcaaaggatggcctgggcaggacttcttaaaaacaaacaggcggctgggcgcggtggctcacgcctgtaatcccagcactttgggaggccgaggcaggcggatcacgaggtcaggggatcgagaccatcctggctaacatggtgaaaccccgtctctactaaaagtataaaaaattagccgggtgtggtggcgggcgtctgtagtcccagctcctccggaggctgaggcaggagaatggcgtgaacccgggaggcggtgcttgaagggagctgagatcatgccactgcactccagcctgggctacagagcgagactccatctcaaaaaaaaaaaaaaaacaggaatgcccctgggtttcgtgctttaaaatggttgattttatgttgtgtgacttttaagttcaataaattaccaatcaaagcaacaaaacacttccagatcatttgaactttgccttaagtatcagaaggcagttagtaattcctggactttgaatgttaaatatgtggggttcttttgttttgttttgttttgtttcgagacggagtcttgctctgtcacccaggctggagtgcagtggcgcgatctcggctcactgcaacctccatctcccgggttcaagtaactctcctgcctcagcctcccgagtagctgggattacaggcccaccacacccagctaattattttgttgtttttggttttggttttggttgtgagacagagtctcacactgtcatctgggctggagtacaatggcgcgatcttggctcactgcaacctccgcctcccatgtttaagtgattctcctgcctcagcctcctgagtagctgggattacaggcgcccgccaccacacccggctacttttttgtatttttagtagagatggggtttcactatgttggccagactggtctcgaactcctgacctcgtgatccaccctcctcagcctcccaaagtgctgggattacaggcgtgagccactgcacccagccccggctaatttttgtattcttagtagagacagggtttcaccatgttggccaggctggtctcgaactcttgacctcatgattcccccaccttggcctcccaaagtgctgggattacaggtgtgagcgcctgcaccctgcccaaaaatatgtggttttgtttgttttttgaggcagagtctccctctgtcgcccaggctggagtgtaatggcacaatctcggctcactgcaacctccgcctcccaggttcaagcaattctcctgcctcaacctcccgagtagctgggactaaaggtgtgcaccaccatacccagctaacttttgtatttttagtagagatgggtttttaccatgttggccaggccgatctcgaactcctgacctcaggtgatccacctgcctcagcctcccaaaatgctgggattacaggtgtgagctactgcccctggccgaaagttaaatgtttctgttctgttcaagtaatattgagaaaaataacaggggccatcttgactctaatgttctgctccaatcaggttcccagaccagaggactgttgttaggtgattggctgtgaacaccctgaggccagtgcccctcgctgcttggcactcggagatgcctgattagcacctttaatcccttaccagtgaggcaggtggaattggccccattttacagatggggagactgaggtgaggaaggttaaagcactcagtggtgggcatgccccctggagccggccctcctttcttccagctgtgagtacccaggaagctgcaccgtgtggcctggagctgtctatctgtccttccagccacctgtctgtccagccacccttccacagactgaggcttgacaccggagcatctgtacagagcaaggagaagacaagaacatgctctaaagcccttcacagcaagacccaggaagccgcgggcaaactcagactcgaaggtaggaagctgggcggccgggtggctggacccagggcgctggctgctgtgcccacgtccagatacctcctgcggggcccacgctctctgtctgaacagcggtggacagtgaatgaagaaagtcaattcagggagcgagagggaggaataagggcagggaagggacgggcgcggtggctcacgcctgtaatcccagcattttgggaggccgaggtgagtggatcacctgaggtcaggagttcgagactggcctggccaacatggcaaaaccccatctctactaaaaatacaaaaaatttagctgggcgtggtggtgcgcgcctgtagtcccagctacttgggaggctgaggcaggagaatcgctcgaacctgggaggcagaggttgcagtgagccaagatcatgccactgcactccagcctgggctgcagagtgagactacatctcaaaaaaaaaaaaaatttgccaggcatgctggctcacgcctgtaatccaagcactttgggaggccaaggcgggtggaggccaggagtttgagaccagcctgaccaacatggagaaacccagtctctactaaaaaatacaaaattagctgggcatggcggtgcatgcctgtaatcccaactactcgggaggctgaggcaggagaattgcttgaacccaggaggcggaggctgcagtgagctcagatcgtgccactgcactccagcctgggcaacaagaatgaaactcagtctcaaaaaaaaaaaaaaaaaaaaaaaggcaggaagcgaggtgggaccggcactgctcaaggtggggcaggagggcacttgaactgcaaccaggaggctgagaagagccagcccctcctctgtgtgatggtctgggacagagtgactggctcggacagaggcccaacattatggagcacctgcttcattgagagagaattcacacaccagtcgattcacccatttaaagtgtaccatcagtgtttttatttatttatttatattttgagacagggtctcactctgttacccaggctggagtacagtggcgcgatcacggttcactgcagcctcgaccttcctagctcaagccatccttctgcctcagcctcctgagtagctgggactatatgcacgcaccaccatatctggctaattttttaatttttttatacagatgggatctcactatgttgctcaggctggtcttgaactcctgggctcaagtgatcttcctgcctcagtctctcaaattgctgggattacaggcatgaaccaccgctcccaaccttcagtgattttgatatattcacagaggctgggcacagtggctcacacctgtaatctcagcactttctgagaggccgaagcaaacttgaggtaaggagttcgagactagcctggccaacatggtgaaaccccatctctactaaagatacaaacattacccaggcatggtggcttgcgcctgtagtcccagctactcgggagactgaggcaggagaatcgcttgaacctgggaagtggaggttggcagtgagccaaaatcgcaccactgcgctctagcctgggtgacagagcaagactctgtctcaaaaactatatgtgtgtgtgtgtgtgtgtgtgtgtgtgtgtgtgtgtgtacatatatatacatattcacagaattgtgccaccatcaccacagtttcagattgctttcatcaccccctaaagaaagcctgcaccctttagctgtcaccccctgcccagtccccaccttcccagtcctaagaaccactaccctgcttctgtctatagatttccctcttctattccgagctttcatatgaatggactcatgcagaggtggccatcgtgactggctcctgtccctggacacaatgttctcaaagctcgtccacgttgtagctttgttaggacttccttccttttgtggctgaaggatgctccattgtgtggctcaaccacattttatatttgtgccttcatctgctgacgggcgcttgtgctgttttcctgctccggctctgcagagccgtgctgccgggcacttcctgtccaggtttctgtgtggacacagtgcttcagtgtgtgaagccatctgctcattttttgttgttgtttgagacggagtctcactctgtcgcccaggctggaggcctggagtgcagtggcgagatctcggctcactgtaaccacaccccccgtcctgggttcaagtgattctcctgcctcagtctcccgaatagctgggactacagttgcccaccaccacacccagctcttttttttttttttttttttttgagacagagttttgctgttgttgcccaggctggagtgcaatggcgagatttcggctcaccgctaactccaccttccaggttcaagcgattctcctgcctcagcctcccgagtagctgggattacagggatgcaccaccatgcctggctaatgttttttgtatttttagtagagataggctttctccatgttggtcaggctggtctcgaactcccgacctcaggtgatccgcccgcctcggcctcccaaaatgctgggattacaggcatgagccaccgcgcccagcctaatttttgtatttttagtagagatggggtttcaccatgttggccaggctggtcttgaactcctggccttaggtgatccgcccacctcagcctcccaaaatgctgagattacaggcgtgagccactgtgcccggtgacatcatccactcatttgctcctccagacgcttctctggggaggaaccgttactctcccccttgtgcaggtcaggacttgggtgatgagttgtcaggtgactaacccgacagcaaatgcaagaccattggcccagtatgcgctgccggctccattgcttttgatcatgaaccccacccccagcagagcttggccagtttgagacaatgaggggcccaggaaagctgggtcaggggtaagcaagggcacaggaagagacgaagagaggtcctggaagtcccagtgagacgtttggactttgggtgagaacaggaaatcctgggagagagttgagcagggaagcaacaggtgtgatctatgcttttgggaggtgaccccagctgcggtgcggagaatgatcagtctcagggggcttgaggcagcaggtagaggaattgagagagtggagtgagcctccaggtgaggagatggtggaggtgaggtggagatggtggaggtgaggtagagatggaggaggaggacaggttcagatggctgctgtctcgccgacccgtgcatgccacgcctcagcccacacacgcccttggctgaagggctcccagggagatgggtatggagtccctggcttcgtacaaggagaggaaaaacaaaacttgcccaggaaccttgggatgtgaaggagaggaaacagctgggggggtttatttttatttttatttttatttttgagacgaagtttcgctcttgttgcccaggctggagtgcaatggtgcaatctcggctcactgcaacctctgcctcccgggttcaagcaattctcctacctcagcctcccgagtagctgagattacaggcatgcgccaccacacccagctaattttttgtatttttagtagagacggggtttctccatgttggtcatgctggtctcgaactcccgacctcaggtgatctgcccaccttggcctcccaaagtgctgggagtacaggcatgagccaccgcgcccggccacagctgggggttttaacaagaagacggtcatggggcagagcaagagacgaaacgaagagaatgaaacaggcagagggtgttaattctggtggagtcagaggggaactggggactggtggcacacgcacaggaaagccccagatggggtactgggcaacagccactgaaatttgggatgtacttactcttcaacccagccattctgcttccagaacttggtcttgtaatagttaaacaagcacacgcggtgtatgcaagggtgttagttgcaacatcagacccatgtctcaaattccggaaacatcctaaataaccagcagtctggacttaagtaaatcttggtgcattccacttatgaaatctttgcattcatcaaaaaagacaagaggcctagggccgggtgtggtggctgaaacctgtaatcccagcactttgggaggccgaggcaggtggatcacctgaggtcaggagttcgagaccagcctgaccaacatggagaaaccccatctctactaaaaatacaaaattagctgggcgtggtggcgcatgcccgtaatccgagcttcttgggaggctgaggcaggagaatcacttgaacctgggaggtggaggttgcggtgagccgagatcgcgccactgcactccaatctgggtgacagaatgagaccccatcacaaaaaaaaagaaaaaagaaaaaaagtaggtctgtccgtatgtgttgacagggaaagatgtctacaatgcaggtaaaatgatagagtgtgggctgggcttggtggctcacgcccataaccccggctacttgggaggctgaggcaagagaattgcttgaacctgggaggtggagggtgcaatgagattggctcacagcaatctcttcctctcgggttcaagtgattctcctgcctcagcctcccgagtagctggaactacaggaatgaggcactatgcctggctaatttttgtattttagtagagatggtgtttcactgtgttggccaggctagtctcgaactcctgaccttaagtgatccatccaccttggtctcccaaagtgttgggattgtacgtgtaagccaccacacacagctgtgtgattttttttttttttcaatgagcatatgccacttttattgttaaacagtgttctcactatgggggagaaaagtgccagacaggtggcagtttcagttatcttttttttttgagacattttctcactctgtcgcccaggctggagtgcagtggcatgatcttggctcactgcaacctctgcctcctgggttcaagcaattctcgtgcctcagcctcccaagtagctgggattataggcatgcgccaccacacctggctaattttgtatttttagtagagacagggttttaccatgttggccaggctggtctcaaactcctgacctcaggtgatccacctacctcggcctcccaaagtgctgggattacaggcatgagccacgcacccagccagttttagttatctttgaaaaatgaactggggctgggcacagtgagcttgcacctgtaatcccagcacttgggaggccaaggcaggcagatggcttaagcccaggagttccagaccagcctggctaacatggagagacccccacctctacagaaaaaagacaagaaaaataaactgggtggccttgggggacagggaccagcacagtaggtttctcatctctcggcccacctcggcctccccaagtgctggtattacaggtgtgagccaccgtccctggcctgcatcttcatgctcttttcagggtttggttcttgcctcaagcggagagatcagaaattgaatgaggtagtaagttgaggacctcccagacccatatggtccgggatgcaaatgatggtcagaaatagacctcactccaaccactgggcctgaggttcagcctggttcaggctgggtttagtccccagggatggtttgtttttggttttgtgtgtgtgtgtgtgtgtgtgtgtgtgtgtgtgtgtgtgtgtgtgtgtgttttcagacagagtcttgctctgtcgccaggctggagtgcagtggcgcgatctcggcttactataaccgctgcctcctgggttcaagccatcctgcctcagcctcccgagtagctgggattacaggcacgtgccaccacgcctagctaattttttgtatttttagtagagacggggtttcaccatgttggccaggatggtctcgatctcctgacctcgtgatccccccacctcggcctcccaaagtgctgggattacaggcgtgagccaccgcgcccagccgcccagagatgtttgaaccaactttaggcaagttggttcttggtctgggctgcgtgccctggcgtcagggtcctgacactgcgccaccccgcaccgcccaccgctgctctcccggtctccattccagccctcccgcctcctgcccacaatggcctctgctgacaagaatggcgggagcgtgtcctctgtgtccagcagccgcctgcagagccggaagccacccaacctctccatcaccatcccgccacccgagaaagagacccaggcccctggcgagcaggacagcatg

SEQ ID NO: 13746 - DNA, 554 bp, Homo sapiens
accctagcatcctgtgattcagccgcgaagacgtggccccaagcctcccaccgccctccttctgtcctgactgcccactcccagggacaccaggttcccagaccagaggactgttgttaggtgattggctgtgaacaccctgaggccagtgcccctcgctgcttggcactcggagatgcctgattagcacctttaatcccttaccagtgaggcaggtggaattggccccattttacagatggggagactgagccacctgtctgtccagccacccttccacagactgaggcttgacaccggagcatctgtacagagcaaggagaagacaagaacatgctctaaagcccttcacagcaagacccaggaagccgcgggcaaactcagactcgaagccctcccgcctcctgcccacaatggcctctgctgacaagaatggcgggagcgtgtcctctgtgtccagcagccgcctgcagagccggaagccacccaacctctccatcaccatcccgccacccgagaaagagacccaggcccctggcgagcaggacagcatg

SEQ ID NO: 13747 - DNA, 19931 bp, Homo sapiens
accgcccagccgctcgcaggcgccgcacggagttgcgtcccggggacttggggccgcagggaggtgagcgcggggcgacgagcggggcaggactcacggccgcccagccgcaggcgccggaagggtcccgaggttgtgcccgagcctgccctggagcggtggtgcgcggccaggaagggtgcccagtgcccggtgcccgccctgcggagcgcctgggtcccacgtgggctcggctggaggcccgggctggctcagacggcgccggcggggccgctggacccggtctgctggcccctagggctcggctcggacaggacgcctaaggggtccctgggcgacggggcgccagatgtaggggcaagacgattgggcagagatttaaacctccggaggaagagaggagactgcgcagggcagtcccgcctgcgtcccagaagtgcctgcagttcagacccttctctcccctccactttctcccgggtgagcaccgggcggaccggggccgaagtttgttggttgagccagccaaggtggaaacaggtgcgggggtggggatgagggactcacacagcagggctggaccggagctcagaaattggacccaggagtcctgacttctggatggaggggctggggaaggttggccctgggcttgccttttacctgtttggcccctcggatgttcccccagggcattgggatagagacggataagttccctagggtacagaccccgccccactcccacgccagggcgcaaaggaagcctaggttttggccctgccccattccatgaaagattaacggagggggctctagggttggagctactgagagggtggcagcgggtgtgtctgaggagcagaaggcggtggggagctgaccccacttggggagaggctgctgttgcctgggcggctggcatcaggcccccagtgtgtgccatttgctggtaatataatgagaccagcatctgccttattcgaccctcactgtccgtagggcaggcagtggaaagggaggcgtgttttagagctgtggttctcaaccaggggcgactttgcctgccatgggatatttggcaatgttggagtcattttgggtgtcacacacttgggaggggaagtgagtgttgttgttactggcaggtagtgggtagaggccagggacgctaccagacatcttcagggcacggaacagcccacataacgaggaattatccagcccaaggtgttgggctgtgctgaggctgagaaaccctgcgcagcagctggtccatcaggttccttctcaatgatgctccctcactggggaaactacctcagttttccagagtggttaggggaggaacttggaataaacctgaatgagatgaggggtaaggcagtgtgagggcacttattcccctcacaagagtcttcctttggtgccatgagacaccgcctttcccaatctccactggccctgcaggaagctggtctaggtgctgtgggggagaggttgggaacagaggacccccttgcagcccaggcctggggtgcttaaccccagggcaatctcccaggaaggctgggctgaggcagcccttgagctcaaatatccctgggctgggagggtgggcagagggcgagctctcttcccatagattttcccaaagctggattgctgaagctggcatggttgcctgataccatgtgacctgctggaattttcccttctgaactcacacctaactcctccaattatgtacaccttttgaaagtgacatccaaggagtatcagggctcctaattcctggggggtccccaggctgcttttgtcctgcaataaagagggcaccctgggttagctgacgagccctggagtgggcccagctgctgatggggtggaggcacccctgcccatggtgttagctgagcagaggtgagagatgggagacatcaaagcacaggccaggtggccccccagtagggatgactcagagttgtttgtattgggctggaggaatgtacttccagttttctggcaacaaggaggggtggctggcacggtgggagaggatcggatgaagcagccacgtccatgcccaggagctggggccacctcgctgccctccctccctgttttcttgcagtagccattatacccatcctgttcacttctggacccagccttcttgcctgggaaccctggtggaggtttcgagcttgggttctttttgttggtgttggtggcttttgttttttttgttttgttttgtttttgtttttgtttttttggtctcttgactgtaaaaggctgaagtgaaactcccaccttttcatttgcacaaaaaacaaaagtggcctccattgctgtgagcctctcaagggacagggctgagcacccaggcttgtacaaagttgttcaggaagtcggcagtggagctcgggtgtgaacccagttgcccaccctcaggccccacccaagagccccacgaacaaaccctcagtgactcctacctgtctgtacctggtgtaaccacacacacacacagacacacacaaacagacacacagagacacacacaaacacacagacacacacagactcacacacacacacacacacacacacacacacacactctctttctctccagcccaggagggggacttttgttcctataagaggaggaataaatcacactacaaatgctttgggtgacgcacttggggcccgagtcctgctctggggtcagtggtgctgtttttcctgtggcctcagctctggatactgtggtggcctctccaccaaggtttctgtccttgctgtgtaaactctgccccagacaaggtgacagatgacagcagaagtcaaggagctgtgcacgcctgcccgtgagtgtgcgagtggcatggctcagctggctggtgcttccctttgggcctggcccccgcctgccgctggcacagcacagggaagacgtgtgccctcctggctgcctctccccctccacactctcctcagatctctgtgcctcgcactctggagcaggcctcggcgctgccccatctgccccaggggatttccagagtgagctcaggcatctgcaccggctgtggaagcgctggctgtcggaagcggctcccagtttcctatccagctgagccaggctgggggaggagtggcggggacgtctgcgcctgcccaagtacaggctgacctcggcggtggtggtggctaggcagggacagctctcagggcacgggcggcttcacagggaaaccaagcctgcccggaacgtcgttttgcctcccaggagacctaggatgggtgtaaggaaaaacacatcttccgggaagtacaaagcgccaccgtgtccacggcccctccttcagcaaatgtatccgggcgcccagctgggagttgtttgtggtccaaaagctactggaaggcagttccagccccagtgcccggctcctgcaggaaagtggtttcagccaagtgggcagtgcaggaggtgggccagagacactgtttggagtgtgaggggaaccttgtgaccagcagaaaaggatggaggaggattccaaacttcaggagctgggccaaggtccaggggctgctgggcacagtcgtccatgtgtgtgctcagtaggatgagttcacttaattagtctgtgcctcagtttccccagctgcacagtgggctcactaacagtaatctacctggagggttgtgtgaggtgaggactcccgtggtaaaggtgtgcagcctgcagtgcagtgcccggccatggcaggagcagtgcggggagccatcgtgataatggtgttagggtggcttcaggtaggggcgtggctgccggtccatggcacagacttgggagatggccgaggccctgcctcgtgggctgtcaaggactagatgggaacacgcatatggagcagtggcactgttgttattgttattctgtaggagtggctgtgtctggggtagggggacctcagtgccttgctggccaagggaagtgagggtgggtttccatctgggcatgaactgctgacctctgcccaggggttttcctggcctgccagtgtgtgtgtgtcactgacagtggggtggggggcagctcatggagttggtgcccctcagctgtgctttccctggcgtaggttcctggggctgggagcagggtaaagctgcctcaagtcttggttttctcctctgcctcccccgtgtggccgccaaccctgtgccagcaggtggtgcagggatggcttcctgccccggtctctggcaagaaacccttttccctctcccagtgggtctccccaggttgtcagctccatttagtcataagaagatctggggccaggcgcggtggctcacgcctgtaatcccagcactttgggaggctgaagcaggcagtcacaaggtcaggagatcgggaccatcctggctaatacggtgaaaccccgtctctactaaaaatacaaaaaaattagccaggtgtggtggcatgcacctgtagtcccagctactcaggaggctgaggcaggagaatcgcttgaacccagaaggcagagcttacagtgagccgagatcaccctactgcactccagcctgggcagcagagcgagactccgtctcaaaaaataaaagaaaaaaaaaagagatctggaagaggagggttgaggatctgctgtggggtttggagtgggaacaggactttgaaccctggcctaagccccttttgaccttgccagcccgtgaggatgatgacagccgcctctcacccttagcctcaactaaatgagatcatgtctgtaaaagtcctttgcaagctgagcagtgctgcccaggcagttaggtgctgtcccttcttcatgaatcaaaggcctttgcatgcaggactcactccagcaccccaaacactcagagtcctcacccgttctttttctcctgcccctcaccagttccagggtggcaagaggctgcagagtgtggaggttaagagcgcgggaccctggctggggttgtagccccaccacctccctaactgtgggaccttggacaggtgacttcatctctctgagcctcagtttccccacctgtcgaatagagatctgtcccctgtggggctcgtggctcagatagagactaagtgagcgatggtggcagagctcagccaggaataaaagaaacttccaactgggcgttgggtgtgtgccaggcactgtacattcatatctgctgtcatcttccctggctccctccgtggtggggcatcaacccatctcacagcagaggaggcaggctctgcagcacccacttgcccaaagtctcccagcaggtaggtggcccaggcaggtttgagtcccatctctggccccttattcctcctcattcctcagcaagagagctccacgctgccccgaagcaaggtgtgggccataagcacgtggctttgcaggcctgcttgggacaagcaacctggtgtccccgtgtcctgaaaccctggcagtcactggggctagggccagcctcttccctgggaagcagggagccccagggcaacgttctgggaaatcaggtttattagttccttaatgaccgtttacaagctcagaagtgtctgcctggcattttccctccctgctgaggggctccatgcagccggaggcagaactgggcctccagaagcgctctgagtgtgtcgaggtgagggcccagggatgccgtcggctccctgggctctgcatgctcacacccagccagtccaggcctatttctggctgggtggcactgggcaaggtgcttacctctctgtacaataggtgagaccttgtacctcagctgagctgttcctggggtgagccctcgttcatggtgacaaagtcacatagatcttagaccctgggaggatactagcatcttatgcatacacaaactgaggctcagagatgttaagtggcttgcccaagatcgcacagtggttagagatgggcctgtgaccctgtcttctgccatcgggacagattttcactgtctggaggcaggtggaaaccgggtgggctcctactttgtaagcacaggacagtgccctgtctgtgtacatgggacagtcacaaacggaaatggcctggtcacaccttagtgtcaaggagcctccagcaggagtgaaacggacctctcacacagaccccaggctgcatctcatcctgccccaaccgctgggcttgtgctggaccaccactgcttccaaggacccgtgaaaacccggctgccgggatgcagagaggcagactttcatgaacgtttgcagcaaagggcagttcccaccgagcctgtgttgctgtggcactgtgtggtgcacaccccaccccggaaaccctccagtgtcctggtgtctgaccccaaatggacagggccttttggcccccaggggccacttctgactcctccccttcacaacgatgctgagggagcaggagaactggggcccggctgctgtgcgtgcccccttcccttcattgccccaaagcctgcagtccagccccaggctcgggagctgctgcctcttccctgggatgtggaaggcacctgcatccccgcccagctgctgccacttgcctgcctccatcagcagctttgttttattttgtctgtgtgttttttgagatggagtcttgctctgtcgcccaggctggagtgcagtggcgtgatctcggctcacttcaacctccgcctcccaggttcaagcgattcttctgcctcagcctcctcagtagctgggattacaggcacccgccaccatgcctggctaatttttgtatttttagtagagatggggtttcaccatgttggccaggctagtctagaactcctgacctcaggtgatctgcccacctcagcctcccaaagtgctgggattacaggtgtgagccactgtgcccagcctccaccagcagcttttgaaatccagaaatttccaggggagggcactgtggtgggtggggcccagcgctgtgtccagctcgaggcctggctgcactgccacctcctttggtgcccacccctgtgtcttgccagcagctgctgcacattgggcttcggggatgcaggactccagcacccccagctcagcctgcttcctggaccaggaaccccagccgaggagggggcatttgtatctctgccatccctgctggcaactggtcctgagaaagcccagatggttggtgcagagggggcgtcaggggctgcaccaccctaagaacatgacatgtcaccccccagccccccgcaacacacacacacaggttcacacctcacacccctgatcttggcggctccctggagcacagcacccgcttcccgtgtctgtggttggcttatgacgccccagccactctaaccgggttaaggggagcccagagcctggggccggataggaaaaagcccagagaagtcaggggatggtcagtcccctgaagctgcccctgggggttcttgatcttctgaactgagttcgaggcaagccctggaggggcgaggaggagaaagaaacagctctctgggccaggacccgctgttcgtgggatgtctggggagctgtgtgaacccacaggccgttttgtttctctccatcagcagctgtgggctgaagcgtgtaccggcggagtgggttgagatcgtgtctgcgcccacttgccaccagctccggcctctggggaggtggtgctgagagggagggagagtggctcctgtttggctcctggagacagacagctgggtgtcccaccctcagagtccccagccccctctcccctctgctaactctgccggtggagctcacgccgcagctcatgccaaccctgcccttctgttttgcctctcatgactctccccaaattctgcccccaggcccccagccagccttcttgccactttcctgccctttactcttgccccttctacctcttgccagggcagcgtcactggctacgtgaggcccagcttggggatgcatggggaggtgtaagaacagctgtgccatgagctgtccttccgggcctctggggctggagaaaccccggggtcagcagtaccacgggttttgctggggattgcacagtgggtgaggctcagcttcctctttgcagctttctaaaaatgccctggttcccagcagggccacaggcagggaaaatgagtttcagtttctgtggcaagggagctggggagagaagcagtttccttgtccccagccctcaccctagcatcctgtgattcagccgcgaagacgtggccccaagcctcccaccgccctccttctgtcctgactgcccactcccagggacaccaggtgacgcctcgcccacccgcggctccggagccaggctggaagcagcttcccgcccagggggtggtttccccacatcctgtcttcagatggcttgagccccctaaacttcctggtcatatccagtggataataatggtctccctctttcctgtctggaggggagggggctgcttacttcttatccaagggcctgtcccgtcccacccctgtgtccccatttctggccacacgcaggctcagcccttgcatcaagcctctgcctgtttccctctgggctgcacctgtcacgctctccctgccctgccccataaagcccatagagcccagggcttgtggggactgcacccttcattagcaagactcagagcttctagaaacccacttgtgtgggggtggggagtgcagggagattggtggcaccaggtggagagagggaactgcacctgggggagttgggaggggcagtgggctgggcccgcgtggaggagtgtggcttgtacagtccgcatggcggggggacccttgtaccctgcctggactggctggtagagctgttggggacctccctgggggtggccttgcttacccagctgtgcggaacaggcttggttgggagtgcctggcctcaccctttgtggggaaaccagattctctgggcagcagtggtaaatggtgtctgagtctgtgtttcgttggatgtgtctgaggtccgctgctgccagctgggttatgctgtctccaaagctatctgcagtgggggaggccctgagcctgggcaggggagggtacagaggcctcaacccatgggacctgggggtgatctgaactctgcacttcactttttttcaggatttcccccgccccaccctaaaggaggaggaaatagagtctgtcccaccctaagccccagtccctctccccaggtctctttggcatctcccagctgggctggggctgaaggcccttctctggggttggccacagtgaggccaggatctggctgggcaggtggcagtgttccgcctgtgggctgggtgcggaggcgggcctgggggtcttagagagagagcggcggatgtgactgcgggccaggaggaagcctggtcccaggatgtcaccatttcccctgcagtgagcaagcatctctagggctcggagataagtgctgggtggggtagctccagctctccagcgcttttttctgtctggttcctgccatctggacttgagccatgaggaaggccagagtgggtctgacagtccccactcctttccccgctgagccccaaggaaggggctgggcctttgcacccccaccccaacttctgcacgagttggaggcagttgatctcaatggtggaaagtggctggtgcaaagtcatgcttccatactccatgtttaggcttcatgggtgtcaaagctgggccgtgaccttgtcccattccctcagagaagggaactgaggccagagggtggagctgctctcaggccgctgcccaggcctcttgtgctctgcggttcagatggcactcccgatgccaggctcctgcccaggaagacatgcccacccgccctggccctgtctctgctgtctggtgtcaggccacctctcttcgggacccccccccaactgattgccctggggctgaccaggctctcctctccctcagtgttgggttttgggagcctctctcatcaggaggttggcacagatgccagccatgcagcggatcctgggcaggggtctcagctgggatggcctggccttgggacagggaggctggctgggcagaaccctagaaccaaaagcggtgcctgtggtgggctagggagctaggtggggagtctagtggggagtctagtggggaggtccactagacactcgttctggcacagcatgcagcgtcctccatcctggccctgctgtgggtacggagccagcagggcaggagctctcagtggagccctccaaagagggctgcttcctggaccagctgcaggatgagggagaccccttctgtccagggctgacataggctgaccaccgccagccccaccctctcactagcttcccattcagttagccattgatgagggctcactgggtgcaggatcctgggctgcccggggttgggtaggggactcctacatgtaggtaaatccgcgagatgctggagagagcaggcaataaagtggttgattctctctggaggtgacattttactttcctagtagggcttggccaggcaggcaaggtggagcctggtgtgccaggcgcagcgcttcagatgagaggaggtgagagcttggggatggcacagggaagtgttttgtctggtgagggtgtggcagggagggcaggcctgaagggacctccagggaggtgtgatcagatctgggttccagaaagatcctacctgcttggcgaccttaactgagctggagtctggaggccccacccttgcacccagctgcttccactgcttgcctcccatcccccagtgccagttccccagggcagtgccctccccatgccctcttggtgtaccctggtcccaaaggaggccaagctatgaacttttcttgcagaggtcccaggtgaggctgttgtcctggagctgtccccagagcaggcttaggatgaggggacctagccacagcttcaaccgagtggggtcccggtgtggctgccagggctccttggcaccaacccagcccagtgggttgatctctgaggacctcgtcatactcagccgggcagtctgccctggggggtggggtcaggactccccagcacttcgggatggaaggaggcgaagccagcgctgctggactagccttaaagaagcgggagacatcctagctccgcctcaagatttctcctctgcacccagcattctgctccccaaatgtcccaaatatgcagggggtcaaggaacattgctcagtggaatcaatggggagcgtgggctactccccagcctctggtttgccccatagcagccccttgggcaccgctggggacccccaggcctctgaggagcttggtttggaaagcgctggaatgctggaccaagttccctctctggctccctgagagggggtcttctagccccagtcttagggcaagaggagcccgtcccctaggagcctccaggccctggagccagacatcgggcgtcctagctacaccctttcctggctatgtgagcttgggcaagttaccaaacccctctgagcctccattcaccatctacagaatggaagagacgctaatgtcaccctggaaggtgttttgaagggtaatgtgtgtaaagggccaaacaaggccccgcacagttaaggacttaaatcctgcccggccccgggagggcttccggcatcttggggttcccctcaaaggatggcctgggcaggacttcttaaaaacaaacaggcggctgggcgcggtggctcacgcctgtaatcccagcactttgggaggccgaggcaggcggatcacgaggtcaggggatcgagaccatcctggctaacatggtgaaaccccgtctctactaaaagtataaaaaattagccgggtgtggtggcgggcgtctgtagtcccagctcctccggaggctgaggcaggagaatggcgtgaacccgggaggcggtgcttgaagggagctgagatcatgccactgcactccagcctgggctacagagcgagactccatctcaaaaaaaaaaaaaaaacaggaatgcccctgggtttcgtgctttaaaatggttgattttatgttgtgtgacttttaagttcaataaattaccaatcaaagcaacaaaacacttccagatcatttgaactttgccttaagtatcagaaggcagttagtaattcctggactttgaatgttaaatatgtggggttcttttgttttgttttgttttgtttcgagacggagtcttgctctgtcacccaggctggagtgcagtggcgcgatctcggctcactgcaacctccatctcccgggttcaagtaactctcctgcctcagcctcccgagtagctgggattacaggcccaccacacccagctaattattttgttgtttttggttttggttttggttgtgagacagagtctcacactgtcatctgggctggagtacaatggcgcgatcttggctcactgcaacctccgcctcccatgtttaagtgattctcctgcctcagcctcctgagtagctgggattacaggcgcccgccaccacacccggctacttttttgtatttttagtagagatggggtttcactatgttggccagactggtctcgaactcctgacctcgtgatccaccctcctcagcctcccaaagtgctgggattacaggcgtgagccactgcacccagccccggctaatttttgtattcttagtagagacagggtttcaccatgttggccaggctggtctcgaactcttgacctcatgattcccccaccttggcctcccaaagtgctgggattacaggtgtgagcgcctgcaccctgcccaaaaatatgtggttttgtttgttttttgaggcagagtctccctctgtcgcccaggctggagtgtaatggcacaatctcggctcactgcaacctccgcctcccaggttcaagcaattctcctgcctcaacctcccgagtagctgggactaaaggtgtgcaccaccatacccagctaacttttgtatttttagtagagatgggtttttaccatgttggccaggccgatctcgaactcctgacctcaggtgatccacctgcctcagcctcccaaaatgctgggattacaggtgtgagctactgcccctggccgaaagttaaatgtttctgttctgttcaagtaatattgagaaaaataacaggggccatcttgactctaatgttctgctccaatcaggttcccagaccagaggactgttgttaggtgattggctgtgaacaccctgaggccagtgcccctcgctgcttggcactcggagatgcctgattagcacctttaatcccttaccagtgaggcaggtggaattggccccattttacagatggggagactgaggtgaggaaggttaaagcactcagtggtgggcatgccccctggagccggccctcctttcttccagctgtgagtacccaggaagctgcaccgtgtggcctggagctgtctatctgtccttccagccacctgtctgtccagccacccttccacagactgaggcttgacaccggagcatctgtacagagcaaggagaagacaagaacatgctctaaagcccttcacagcaagacccaggaagccgcgggcaaactcagactcgaaggtaggaagctgggcggccgggtggctggacccagggcgctggctgctgtgcccacgtccagatacctcctgcggggcccacgctctctgtctgaacagcggtggacagtgaatgaagaaagtcaattcagggagcgagagggaggaataagggcagggaagggacgggcgcggtggctcacgcctgtaatcccagcattttgggaggccgaggtgagtggatcacctgaggtcaggagttcgagactggcctggccaacatggcaaaaccccatctctactaaaaatacaaaaaatttagctgggcgtggtggtgcgcgcctgtagtcccagctacttgggaggctgaggcaggagaatcgctcgaacctgggaggcagaggttgcagtgagccaagatcatgccactgcactccagcctgggctgcagagtgagactacatctcaaaaaaaaaaaaaatttgccaggcatgctggctcacgcctgtaatccaagcactttgggaggccaaggcgggtggaggccaggagtttgagaccagcctgaccaacatggagaaacccagtctctactaaaaaatacaaaattagctgggcatggcggtgcatgcctgtaatcccaactactcgggaggctgaggcaggagaattgcttgaacccaggaggcggaggctgcagtgagctcagatcgtgccactgcactccagcctgggcaacaagaatgaaactcagtctcaaaaaaaaaaaaaaaaaaaaaaaggcaggaagcgaggtgggaccggcactgctcaaggtggggcaggagggcacttgaactgcaaccaggaggctgagaagagccagcccctcctctgtgtgatggtctgggacagagtgactggctcggacagaggcccaacattatggagcacctgcttcattgagagagaattcacacaccagtcgattcacccatttaaagtgtaccatcagtgtttttatttatttatttatattttgagacagggtctcactctgttacccaggctggagtacagtggcgcgatcacggttcactgcagcctcgaccttcctagctcaagccatccttctgcctcagcctcctgagtagctgggactatatgcacgcaccaccatatctggctaattttttaatttttttatacagatgggatctcactatgttgctcaggctggtcttgaactcctgggctcaagtgatcttcctgcctcagtctctcaaattgctgggattacaggcatgaaccaccgctcccaaccttcagtgattttgatatattcacagaggctgggcacagtggctcacacctgtaatctcagcactttctgagaggccgaagcaaacttgaggtaaggagttcgagactagcctggccaacatggtgaaaccccatctctactaaagatacaaacattacccaggcatggtggcttgcgcctgtagtcccagctactcgggagactgaggcaggagaatcgcttgaacctgggaagtggaggttggcagtgagccaaaatcgcaccactgcgctctagcctgggtgacagagcaagactctgtctcaaaaactatatgtgtgtgtgtgtgtgtgtgtgtgtgtgtgtgtgtgtgtacatatatatacatattcacagaattgtgccaccatcaccacagtttcagattgctttcatcaccccctaaagaaagcctgcaccctttagctgtcaccccctgcccagtccccaccttcccagtcctaagaaccactaccctgcttctgtctatagatttccctcttctattccgagctttcatatgaatggactcatgcagaggtggccatcgtgactggctcctgtccctggacacaatgttctcaaagctcgtccacgttgtagctttgttaggacttccttccttttgtggctgaaggatgctccattgtgtggctcaaccacattttatatttgtgccttcatctgctgacgggcgcttgtgctgttttcctgctccggctctgcagagccgtgctgccgggcacttcctgtccaggtttctgtgtggacacagtgcttcagtgtgtgaagccatctgctcattttttgttgttgtttgagacggagtctcactctgtcgcccaggctggaggcctggagtgcagtggcgagatctcggctcactgtaaccacaccccccgtcctgggttcaagtgattctcctgcctcagtctcccgaatagctgggactacagttgcccaccaccacacccagctcttttttttttttttttttttttgagacagagttttgctgttgttgcccaggctggagtgcaatggcgagatttcggctcaccgctaactccaccttccaggttcaagcgattctcctgcctcagcctcccgagtagctgggattacagggatgcaccaccatgcctggctaatgttttttgtatttttagtagagataggctttctccatgttggtcaggctggtctcgaactcccgacctcaggtgatccgcccgcctcggcctcccaaaatgctgggattacaggcatgagccaccgcgcccagcctaatttttgtatttttagtagagatggggtttcaccatgttggccaggctggtcttgaactcctggccttaggtgatccgcccacctcagcctcccaaaatgctgagattacaggcgtgagccactgtgcccggtgacatcatccactcatttgctcctccagacgcttctctggggaggaaccgttactctcccccttgtgcaggtcaggacttgggtgatgagttgtcaggtgactaacccgacagcaaatgcaagaccattggcccagtatgcgctgccggctccattgcttttgatcatgaaccccacccccagcagagcttggccagtttgagacaatgaggggcccaggaaagctgggtcaggggtaagcaagggcacaggaagagacgaagagaggtcctggaagtcccagtgagacgtttggactttgggtgagaacaggaaatcctgggagagagttgagcagggaagcaacaggtgtgatctatgcttttgggaggtgaccccagctgcggtgcggagaatgatcagtctcagggggcttgaggcagcaggtagaggaattgagagagtggagtgagcctccaggtgaggagatggtggaggtgaggtggagatggtggaggtgaggtagagatggaggaggaggacaggttcagatggctgctgtctcgccgacccgtgcatgccacgcctcagcccacacacgcccttggctgaagggctcccagggagatgggtatggagtccctggcttcgtacaaggagaggaaaaacaaaacttgcccaggaaccttgggatgtgaaggagaggaaacagctgggggggtttatttttatttttatttttatttttgagacgaagtttcgctcttgttgcccaggctggagtgcaatggtgcaatctcggctcactgcaacctctgcctcccgggttcaagcaattctcctacctcagcctcccgagtagctgagattacaggcatgcgccaccacacccagctaattttttgtatttttagtagagacggggtttctccatgttggtcatgctggtctcgaactcccgacctcaggtgatctgcccaccttggcctcccaaagtgctgggagtacaggcatgagccaccgcgcccggccacagctgggggttttaacaagaagacggtcatggggcagagcaagagacgaaacgaagagaatgaaacaggcagagggtgttaattctggtggagtcagaggggaactggggactggtggcacacgcacaggaaagccccagatggggtactgggcaacagccactgaaatttgggatgtacttactcttcaacccagccattctgcttccagaacttggtcttgtaatagttaaacaagcacacgcggtgtatgcaagggtgttagttgcaacatcagacccatgtctcaaattccggaaacatcctaaataaccagcagtctggacttaagtaaatcttggtgcattccacttatgaaatctttgcattcatcaaaaaagacaagaggcctagggccgggtgtggtggctgaaacctgtaatcccagcactttgggaggccgaggcaggtggatcacctgaggtcaggagttcgagaccagcctgaccaacatggagaaaccccatctctactaaaaatacaaaattagctgggcgtggtggcgcatgcccgtaatccgagcttcttgggaggctgaggcaggagaatcacttgaacctgggaggtggaggttgcggtgagccgagatcgcgccactgcactccaatctgggtgacagaatgagaccccatcacaaaaaaaaagaaaaaagaaaaaaagtaggtctgtccgtatgtgttgacagggaaagatgtctacaatgcaggtaaaatgatagagtgtgggctgggcttggtggctcacgcccataaccccggctacttgggaggctgaggcaagagaattgcttgaacctgggaggtggagggtgcaatgagattggctcacagcaatctcttcctctcgggttcaagtgattctcctgcctcagcctcccgagtagctggaactacaggaatgaggcactatgcctggctaatttttgtattttagtagagatggtgtttcactgtgttggccaggctagtctcgaactcctgaccttaagtgatccatccaccttggtctcccaaagtgttgggattgtacgtgtaagccaccacacacagctgtgtgattttttttttttttcaatgagcatatgccacttttattgttaaacagtgttctcactatgggggagaaaagtgccagacaggtggcagtttcagttatcttttttttttgagacattttctcactctgtcgcccaggctggagtgcagtggcatgatcttggctcactgcaacctctgcctcctgggttcaagcaattctcgtgcctcagcctcccaagtagctgggattataggcatgcgccaccacacctggctaattttgtatttttagtagagacagggttttaccatgttggccaggctggtctcaaactcctgacctcaggtgatccacctacctcggcctcccaaagtgctgggattacaggcatgagccacgcacccagccagttttagttatctttgaaaaatgaactggggctgggcacagtgagcttgcacctgtaatcccagcacttgggaggccaaggcaggcagatggcttaagcccaggagttccagaccagcctggctaacatggagagacccccacctctacagaaaaaagacaagaaaaataaactgggtggccttgggggacagggaccagcacagtaggtttctcatctctcggcccacctcggcctccccaagtgctggtattacaggtgtgagccaccgtccctggcctgcatcttcatgctcttttcagggtttggttcttgcctcaagcggagagatcagaaattgaatgaggtagtaagttgaggacctcccagacccatatggtccgggatgcaaatgatggtcagaaatagacctcactccaaccactgggcctgaggttcagcctggttcaggctgggtttagtccccagggatggtttgtttttggttttgtgtgtgtgtgtgtgtgtgtgtgtgtgtgtgtgtgtgtgtgtgtgtgtgttttcagacagagtcttgctctgtcgccaggctggagtgcagtggcgcgatctcggcttactataaccgctgcctcctgggttcaagccatcctgcctcagcctcccgagtagctgggattacaggcacgtgccaccacgcctagctaattttttgtatttttagtagagacggggtttcaccatgttggccaggatggtctcgatctcctgacctcgtgatccccccacctcggcctcccaaagtgctgggattacaggcgtgagccaccgcgcccagccgcccagagatgtttgaaccaactttaggcaagttggttcttggtctgggctgcgtgccctggcgtcagggtcctgacactgcgccaccccgcaccgcccaccgctgctctcccggtctccattccagccctcccgcctcctgcccacaatggcctctgctgacaagaatggcgggagcgtgtcctctg

SEQ ID NO: 13748 - DNA, 545 bp, Homo sapiens
accgcccagccgctcgcaggcgccgcacggagttgcgtcccggggacttggggccgcagggaggttcccagaccagaggactgttgttaggtgattggctgtgaacaccctgaggccagtgcccctcgctgcttggcactcggagatgcctgattagcacctttaatcccttaccagtgaggcaggtggaattggccccattttacagatggggagactgaggtgaggaaggttaaagcactcagtggtgggcatgccccctggagccggccctcctttcttccagctgtgagtacccaggaagctgcaccgtgtggcctggagctgtctatctgtccttccagccacctgtctgtccagccacccttccacagactgaggcttgacaccggagcatctgtacagagcaaggagaagacaagaacatgctctaaagcccttcacagcaagacccaggaagccgcgggcaaactcagactcgaagccctcccgcctcctgcccacaatggcctctgctgacaagaatggcgggagcgtgtcctctg

SEQ ID NO: 13749 - DNA, 21641 bp, Homo sapiens
gaggagccaccgcccagccgctcgcaggcgccgcacggagttgcgtcccggggacttggggccgcagggaggtgagcgcggggcgacgagcggggcaggactcacggccgcccagccgcaggcgccggaagggtcccgaggttgtgcccgagcctgccctggagcggtggtgcgcggccaggaagggtgcccagtgcccggtgcccgccctgcggagcgcctgggtcccacgtgggctcggctggaggcccgggctggctcagacggcgccggcggggccgctggacccggtctgctggcccctagggctcggctcggacaggacgcctaaggggtccctgggcgacggggcgccagatgtaggggcaagacgattgggcagagatttaaacctccggaggaagagaggagactgcgcagggcagtcccgcctgcgtcccagaagtgcctgcagttcagacccttctctcccctccactttctcccgggtgagcaccgggcggaccggggccgaagtttgttggttgagccagccaaggtggaaacaggtgcgggggtggggatgagggactcacacagcagggctggaccggagctcagaaattggacccaggagtcctgacttctggatggaggggctggggaaggttggccctgggcttgccttttacctgtttggcccctcggatgttcccccagggcattgggatagagacggataagttccctagggtacagaccccgccccactcccacgccagggcgcaaaggaagcctaggttttggccctgccccattccatgaaagattaacggagggggctctagggttggagctactgagagggtggcagcgggtgtgtctgaggagcagaaggcggtggggagctgaccccacttggggagaggctgctgttgcctgggcggctggcatcaggcccccagtgtgtgccatttgctggtaatataatgagaccagcatctgccttattcgaccctcactgtccgtagggcaggcagtggaaagggaggcgtgttttagagctgtggttctcaaccaggggcgactttgcctgccatgggatatttggcaatgttggagtcattttgggtgtcacacacttgggaggggaagtgagtgttgttgttactggcaggtagtgggtagaggccagggacgctaccagacatcttcagggcacggaacagcccacataacgaggaattatccagcccaaggtgttgggctgtgctgaggctgagaaaccctgcgcagcagctggtccatcaggttccttctcaatgatgctccctcactggggaaactacctcagttttccagagtggttaggggaggaacttggaataaacctgaatgagatgaggggtaaggcagtgtgagggcacttattcccctcacaagagtcttcctttggtgccatgagacaccgcctttcccaatctccactggccctgcaggaagctggtctaggtgctgtgggggagaggttgggaacagaggacccccttgcagcccaggcctggggtgcttaaccccagggcaatctcccaggaaggctgggctgaggcagcccttgagctcaaatatccctgggctgggagggtgggcagagggcgagctctcttcccatagattttcccaaagctggattgctgaagctggcatggttgcctgataccatgtgacctgctggaattttcccttctgaactcacacctaactcctccaattatgtacaccttttgaaagtgacatccaaggagtatcagggctcctaattcctggggggtccccaggctgcttttgtcctgcaataaagagggcaccctgggttagctgacgagccctggagtgggcccagctgctgatggggtggaggcacccctgcccatggtgttagctgagcagaggtgagagatgggagacatcaaagcacaggccaggtggccccccagtagggatgactcagagttgtttgtattgggctggaggaatgtacttccagttttctggcaacaaggaggggtggctggcacggtgggagaggatcggatgaagcagccacgtccatgcccaggagctggggccacctcgctgccctccctccctgttttcttgcagtagccattatacccatcctgttcacttctggacccagccttcttgcctgggaaccctggtggaggtttcgagcttgggttctttttgttggtgttggtggcttttgttttttttgttttgttttgtttttgtttttgtttttttggtctcttgactgtaaaaggctgaagtgaaactcccaccttttcatttgcacaaaaaacaaaagtggcctccattgctgtgagcctctcaagggacagggctgagcacccaggcttgtacaaagttgttcaggaagtcggcagtggagctcgggtgtgaacccagttgcccaccctcaggccccacccaagagccccacgaacaaaccctcagtgactcctacctgtctgtacctggtgtaaccacacacacacacagacacacacaaacagacacacagagacacacacaaacacacagacacacacagactcacacacacacacacacacacacacacacacacactctctttctctccagcccaggagggggacttttgttcctataagaggaggaataaatcacactacaaatgctttgggtgacgcacttggggcccgagtcctgctctggggtcagtggtgctgtttttcctgtggcctcagctctggatactgtggtggcctctccaccaaggtttctgtccttgctgtgtaaactctgccccagacaaggtgacagatgacagcagaagtcaaggagctgtgcacgcctgcccgtgagtgtgcgagtggcatggctcagctggctggtgcttccctttgggcctggcccccgcctgccgctggcacagcacagggaagacgtgtgccctcctggctgcctctccccctccacactctcctcagatctctgtgcctcgcactctggagcaggcctcggcgctgccccatctgccccaggggatttccagagtgagctcaggcatctgcaccggctgtggaagcgctggctgtcggaagcggctcccagtttcctatccagctgagccaggctgggggaggagtggcggggacgtctgcgcctgcccaagtacaggctgacctcggcggtggtggtggctaggcagggacagctctcagggcacgggcggcttcacagggaaaccaagcctgcccggaacgtcgttttgcctcccaggagacctaggatgggtgtaaggaaaaacacatcttccgggaagtacaaagcgccaccgtgtccacggcccctccttcagcaaatgtatccgggcgcccagctgggagttgtttgtggtccaaaagctactggaaggcagttccagccccagtgcccggctcctgcaggaaagtggtttcagccaagtgggcagtgcaggaggtgggccagagacactgtttggagtgtgaggggaaccttgtgaccagcagaaaaggatggaggaggattccaaacttcaggagctgggccaaggtccaggggctgctgggcacagtcgtccatgtgtgtgctcagtaggatgagttcacttaattagtctgtgcctcagtttccccagctgcacagtgggctcactaacagtaatctacctggagggttgtgtgaggtgaggactcccgtggtaaaggtgtgcagcctgcagtgcagtgcccggccatggcaggagcagtgcggggagccatcgtgataatggtgttagggtggcttcaggtaggggcgtggctgccggtccatggcacagacttgggagatggccgaggccctgcctcgtgggctgtcaaggactagatgggaacacgcatatggagcagtggcactgttgttattgttattctgtaggagtggctgtgtctggggtagggggacctcagtgccttgctggccaagggaagtgagggtgggtttccatctgggcatgaactgctgacctctgcccaggggttttcctggcctgccagtgtgtgtgtgtcactgacagtggggtggggggcagctcatggagttggtgcccctcagctgtgctttccctggcgtaggttcctggggctgggagcagggtaaagctgcctcaagtcttggttttctcctctgcctcccccgtgtggccgccaaccctgtgccagcaggtggtgcagggatggcttcctgccccggtctctggcaagaaacccttttccctctcccagtgggtctccccaggttgtcagctccatttagtcataagaagatctggggccaggcgcggtggctcacgcctgtaatcccagcactttgggaggctgaagcaggcagtcacaaggtcaggagatcgggaccatcctggctaatacggtgaaaccccgtctctactaaaaatacaaaaaaattagccaggtgtggtggcatgcacctgtagtcccagctactcaggaggctgaggcaggagaatcgcttgaacccagaaggcagagcttacagtgagccgagatcaccctactgcactccagcctgggcagcagagcgagactccgtctcaaaaaataaaagaaaaaaaaaagagatctggaagaggagggttgaggatctgctgtggggtttggagtgggaacaggactttgaaccctggcctaagccccttttgaccttgccagcccgtgaggatgatgacagccgcctctcacccttagcctcaactaaatgagatcatgtctgtaaaagtcctttgcaagctgagcagtgctgcccaggcagttaggtgctgtcccttcttcatgaatcaaaggcctttgcatgcaggactcactccagcaccccaaacactcagagtcctcacccgttctttttctcctgcccctcaccagttccagggtggcaagaggctgcagagtgtggaggttaagagcgcgggaccctggctggggttgtagccccaccacctccctaactgtgggaccttggacaggtgacttcatctctctgagcctcagtttccccacctgtcgaatagagatctgtcccctgtggggctcgtggctcagatagagactaagtgagcgatggtggcagagctcagccaggaataaaagaaacttccaactgggcgttgggtgtgtgccaggcactgtacattcatatctgctgtcatcttccctggctccctccgtggtggggcatcaacccatctcacagcagaggaggcaggctctgcagcacccacttgcccaaagtctcccagcaggtaggtggcccaggcaggtttgagtcccatctctggccccttattcctcctcattcctcagcaagagagctccacgctgccccgaagcaaggtgtgggccataagcacgtggctttgcaggcctgcttgggacaagcaacctggtgtccccgtgtcctgaaaccctggcagtcactggggctagggccagcctcttccctgggaagcagggagccccagggcaacgttctgggaaatcaggtttattagttccttaatgaccgtttacaagctcagaagtgtctgcctggcattttccctccctgctgaggggctccatgcagccggaggcagaactgggcctccagaagcgctctgagtgtgtcgaggtgagggcccagggatgccgtcggctccctgggctctgcatgctcacacccagccagtccaggcctatttctggctgggtggcactgggcaaggtgcttacctctctgtacaataggtgagaccttgtacctcagctgagctgttcctggggtgagccctcgttcatggtgacaaagtcacatagatcttagaccctgggaggatactagcatcttatgcatacacaaactgaggctcagagatgttaagtggcttgcccaagatcgcacagtggttagagatgggcctgtgaccctgtcttctgccatcgggacagattttcactgtctggaggcaggtggaaaccgggtgggctcctactttgtaagcacaggacagtgccctgtctgtgtacatgggacagtcacaaacggaaatggcctggtcacaccttagtgtcaaggagcctccagcaggagtgaaacggacctctcacacagaccccaggctgcatctcatcctgccccaaccgctgggcttgtgctggaccaccactgcttccaaggacccgtgaaaacccggctgccgggatgcagagaggcagactttcatgaacgtttgcagcaaagggcagttcccaccgagcctgtgttgctgtggcactgtgtggtgcacaccccaccccggaaaccctccagtgtcctggtgtctgaccccaaatggacagggccttttggcccccaggggccacttctgactcctccccttcacaacgatgctgagggagcaggagaactggggcccggctgctgtgcgtgcccccttcccttcattgccccaaagcctgcagtccagccccaggctcgggagctgctgcctcttccctgggatgtggaaggcacctgcatccccgcccagctgctgccacttgcctgcctccatcagcagctttgttttattttgtctgtgtgttttttgagatggagtcttgctctgtcgcccaggctggagtgcagtggcgtgatctcggctcacttcaacctccgcctcccaggttcaagcgattcttctgcctcagcctcctcagtagctgggattacaggcacccgccaccatgcctggctaatttttgtatttttagtagagatggggtttcaccatgttggccaggctagtctagaactcctgacctcaggtgatctgcccacctcagcctcccaaagtgctgggattacaggtgtgagccactgtgcccagcctccaccagcagcttttgaaatccagaaatttccaggggagggcactgtggtgggtggggcccagcgctgtgtccagctcgaggcctggctgcactgccacctcctttggtgcccacccctgtgtcttgccagcagctgctgcacattgggcttcggggatgcaggactccagcacccccagctcagcctgcttcctggaccaggaaccccagccgaggagggggcatttgtatctctgccatccctgctggcaactggtcctgagaaagcccagatggttggtgcagagggggcgtcaggggctgcaccaccctaagaacatgacatgtcaccccccagccccccgcaacacacacacacaggttcacacctcacacccctgatcttggcggctccctggagcacagcacccgcttcccgtgtctgtggttggcttatgacgccccagccactctaaccgggttaaggggagcccagagcctggggccggataggaaaaagcccagagaagtcaggggatggtcagtcccctgaagctgcccctgggggttcttgatcttctgaactgagttcgaggcaagccctggaggggcgaggaggagaaagaaacagctctctgggccaggacccgctgttcgtgggatgtctggggagctgtgtgaacccacaggccgttttgtttctctccatcagcagctgtgggctgaagcgtgtaccggcggagtgggttgagatcgtgtctgcgcccacttgccaccagctccggcctctggggaggtggtgctgagagggagggagagtggctcctgtttggctcctggagacagacagctgggtgtcccaccctcagagtccccagccccctctcccctctgctaactctgccggtggagctcacgccgcagctcatgccaaccctgcccttctgttttgcctctcatgactctccccaaattctgcccccaggcccccagccagccttcttgccactttcctgccctttactcttgccccttctacctcttgccagggcagcgtcactggctacgtgaggcccagcttggggatgcatggggaggtgtaagaacagctgtgccatgagctgtccttccgggcctctggggctggagaaaccccggggtcagcagtaccacgggttttgctggggattgcacagtgggtgaggctcagcttcctctttgcagctttctaaaaatgccctggttcccagcagggccacaggcagggaaaatgagtttcagtttctgtggcaagggagctggggagagaagcagtttccttgtccccagccctcaccctagcatcctgtgattcagccgcgaagacgtggccccaagcctcccaccgccctccttctgtcctgactgcccactcccagggacaccaggtgacgcctcgcccacccgcggctccggagccaggctggaagcagcttcccgcccagggggtggtttccccacatcctgtcttcagatggcttgagccccctaaacttcctggtcatatccagtggataataatggtctccctctttcctgtctggaggggagggggctgcttacttcttatccaagggcctgtcccgtcccacccctgtgtccccatttctggccacacgcaggctcagcccttgcatcaagcctctgcctgtttccctctgggctgcacctgtcacgctctccctgccctgccccataaagcccatagagcccagggcttgtggggactgcacccttcattagcaagactcagagcttctagaaacccacttgtgtgggggtggggagtgcagggagattggtggcaccaggtggagagagggaactgcacctgggggagttgggaggggcagtgggctgggcccgcgtggaggagtgtggcttgtacagtccgcatggcggggggacccttgtaccctgcctggactggctggtagagctgttggggacctccctgggggtggccttgcttacccagctgtgcggaacaggcttggttgggagtgcctggcctcaccctttgtggggaaaccagattctctgggcagcagtggtaaatggtgtctgagtctgtgtttcgttggatgtgtctgaggtccgctgctgccagctgggttatgctgtctccaaagctatctgcagtgggggaggccctgagcctgggcaggggagggtacagaggcctcaacccatgggacctgggggtgatctgaactctgcacttcactttttttcaggatttcccccgccccaccctaaaggaggaggaaatagagtctgtcccaccctaagccccagtccctctccccaggtctctttggcatctcccagctgggctggggctgaaggcccttctctggggttggccacagtgaggccaggatctggctgggcaggtggcagtgttccgcctgtgggctgggtgcggaggcgggcctgggggtcttagagagagagcggcggatgtgactgcgggccaggaggaagcctggtcccaggatgtcaccatttcccctgcagtgagcaagcatctctagggctcggagataagtgctgggtggggtagctccagctctccagcgcttttttctgtctggttcctgccatctggacttgagccatgaggaaggccagagtgggtctgacagtccccactcctttccccgctgagccccaaggaaggggctgggcctttgcacccccaccccaacttctgcacgagttggaggcagttgatctcaatggtggaaagtggctggtgcaaagtcatgcttccatactccatgtttaggcttcatgggtgtcaaagctgggccgtgaccttgtcccattccctcagagaagggaactgaggccagagggtggagctgctctcaggccgctgcccaggcctcttgtgctctgcggttcagatggcactcccgatgccaggctcctgcccaggaagacatgcccacccgccctggccctgtctctgctgtctggtgtcaggccacctctcttcgggacccccccccaactgattgccctggggctgaccaggctctcctctccctcagtgttgggttttgggagcctctctcatcaggaggttggcacagatgccagccatgcagcggatcctgggcaggggtctcagctgggatggcctggccttgggacagggaggctggctgggcagaaccctagaaccaaaagcggtgcctgtggtgggctagggagctaggtggggagtctagtggggagtctagtggggaggtccactagacactcgttctggcacagcatgcagcgtcctccatcctggccctgctgtgggtacggagccagcagggcaggagctctcagtggagccctccaaagagggctgcttcctggaccagctgcaggatgagggagaccccttctgtccagggctgacataggctgaccaccgccagccccaccctctcactagcttcccattcagttagccattgatgagggctcactgggtgcaggatcctgggctgcccggggttgggtaggggactcctacatgtaggtaaatccgcgagatgctggagagagcaggcaataaagtggttgattctctctggaggtgacattttactttcctagtagggcttggccaggcaggcaaggtggagcctggtgtgccaggcgcagcgcttcagatgagaggaggtgagagcttggggatggcacagggaagtgttttgtctggtgagggtgtggcagggagggcaggcctgaagggacctccagggaggtgtgatcagatctgggttccagaaagatcctacctgcttggcgaccttaactgagctggagtctggaggccccacccttgcacccagctgcttccactgcttgcctcccatcccccagtgccagttccccagggcagtgccctccccatgccctcttggtgtaccctggtcccaaaggaggccaagctatgaacttttcttgcagaggtcccaggtgaggctgttgtcctggagctgtccccagagcaggcttaggatgaggggacctagccacagcttcaaccgagtggggtcccggtgtggctgccagggctccttggcaccaacccagcccagtgggttgatctctgaggacctcgtcatactcagccgggcagtctgccctggggggtggggtcaggactccccagcacttcgggatggaaggaggcgaagccagcgctgctggactagccttaaagaagcgggagacatcctagctccgcctcaagatttctcctctgcacccagcattctgctccccaaatgtcccaaatatgcagggggtcaaggaacattgctcagtggaatcaatggggagcgtgggctactccccagcctctggtttgccccatagcagccccttgggcaccgctggggacccccaggcctctgaggagcttggtttggaaagcgctggaatgctggaccaagttccctctctggctccctgagagggggtcttctagccccagtcttagggcaagaggagcccgtcccctaggagcctccaggccctggagccagacatcgggcgtcctagctacaccctttcctggctatgtgagcttgggcaagttaccaaacccctctgagcctccattcaccatctacagaatggaagagacgctaatgtcaccctggaaggtgttttgaagggtaatgtgtgtaaagggccaaacaaggccccgcacagttaaggacttaaatcctgcccggccccgggagggcttccggcatcttggggttcccctcaaaggatggcctgggcaggacttcttaaaaacaaacaggcggctgggcgcggtggctcacgcctgtaatcccagcactttgggaggccgaggcaggcggatcacgaggtcaggggatcgagaccatcctggctaacatggtgaaaccccgtctctactaaaagtataaaaaattagccgggtgtggtggcgggcgtctgtagtcccagctcctccggaggctgaggcaggagaatggcgtgaacccgggaggcggtgcttgaagggagctgagatcatgccactgcactccagcctgggctacagagcgagactccatctcaaaaaaaaaaaaaaaacaggaatgcccctgggtttcgtgctttaaaatggttgattttatgttgtgtgacttttaagttcaataaattaccaatcaaagcaacaaaacacttccagatcatttgaactttgccttaagtatcagaaggcagttagtaattcctggactttgaatgttaaatatgtggggttcttttgttttgttttgttttgtttcgagacggagtcttgctctgtcacccaggctggagtgcagtggcgcgatctcggctcactgcaacctccatctcccgggttcaagtaactctcctgcctcagcctcccgagtagctgggattacaggcccaccacacccagctaattattttgttgtttttggttttggttttggttgtgagacagagtctcacactgtcatctgggctggagtacaatggcgcgatcttggctcactgcaacctccgcctcccatgtttaagtgattctcctgcctcagcctcctgagtagctgggattacaggcgcccgccaccacacccggctacttttttgtatttttagtagagatggggtttcactatgttggccagactggtctcgaactcctgacctcgtgatccaccctcctcagcctcccaaagtgctgggattacaggcgtgagccactgcacccagccccggctaatttttgtattcttagtagagacagggtttcaccatgttggccaggctggtctcgaactcttgacctcatgattcccccaccttggcctcccaaagtgctgggattacaggtgtgagcgcctgcaccctgcccaaaaatatgtggttttgtttgttttttgaggcagagtctccctctgtcgcccaggctggagtgtaatggcacaatctcggctcactgcaacctccgcctcccaggttcaagcaattctcctgcctcaacctcccgagtagctgggactaaaggtgtgcaccaccatacccagctaacttttgtatttttagtagagatgggtttttaccatgttggccaggccgatctcgaactcctgacctcaggtgatccacctgcctcagcctcccaaaatgctgggattacaggtgtgagctactgcccctggccgaaagttaaatgtttctgttctgttcaagtaatattgagaaaaataacaggggccatcttgactctaatgttctgctccaatcaggttcccagaccagaggactgttgttaggtgattggctgtgaacaccctgaggccagtgcccctcgctgcttggcactcggagatgcctgattagcacctttaatcccttaccagtgaggcaggtggaattggccccattttacagatggggagactgaggtgaggaaggttaaagcactcagtggtgggcatgccccctggagccggccctcctttcttccagctgtgagtacccaggaagctgcaccgtgtggcctggagctgtctatctgtccttccagccacctgtctgtccagccacccttccacagactgaggcttgacaccggagcatctgtacagagcaaggagaagacaagaacatgctctaaagcccttcacagcaagacccaggaagccgcgggcaaactcagactcgaaggtaggaagctgggcggccgggtggctggacccagggcgctggctgctgtgcccacgtccagatacctcctgcggggcccacgctctctgtctgaacagcggtggacagtgaatgaagaaagtcaattcagggagcgagagggaggaataagggcagggaagggacgggcgcggtggctcacgcctgtaatcccagcattttgggaggccgaggtgagtggatcacctgaggtcaggagttcgagactggcctggccaacatggcaaaaccccatctctactaaaaatacaaaaaatttagctgggcgtggtggtgcgcgcctgtagtcccagctacttgggaggctgaggcaggagaatcgctcgaacctgggaggcagaggttgcagtgagccaagatcatgccactgcactccagcctgggctgcagagtgagactacatctcaaaaaaaaaaaaaatttgccaggcatgctggctcacgcctgtaatccaagcactttgggaggccaaggcgggtggaggccaggagtttgagaccagcctgaccaacatggagaaacccagtctctactaaaaaatacaaaattagctgggcatggcggtgcatgcctgtaatcccaactactcgggaggctgaggcaggagaattgcttgaacccaggaggcggaggctgcagtgagctcagatcgtgccactgcactccagcctgggcaacaagaatgaaactcagtctcaaaaaaaaaaaaaaaaaaaaaaaggcaggaagcgaggtgggaccggcactgctcaaggtggggcaggagggcacttgaactgcaaccaggaggctgagaagagccagcccctcctctgtgtgatggtctgggacagagtgactggctcggacagaggcccaacattatggagcacctgcttcattgagagagaattcacacaccagtcgattcacccatttaaagtgtaccatcagtgtttttatttatttatttatattttgagacagggtctcactctgttacccaggctggagtacagtggcgcgatcacggttcactgcagcctcgaccttcctagctcaagccatccttctgcctcagcctcctgagtagctgggactatatgcacgcaccaccatatctggctaattttttaatttttttatacagatgggatctcactatgttgctcaggctggtcttgaactcctgggctcaagtgatcttcctgcctcagtctctcaaattgctgggattacaggcatgaaccaccgctcccaaccttcagtgattttgatatattcacagaggctgggcacagtggctcacacctgtaatctcagcactttctgagaggccgaagcaaacttgaggtaaggagttcgagactagcctggccaacatggtgaaaccccatctctactaaagatacaaacattacccaggcatggtggcttgcgcctgtagtcccagctactcgggagactgaggcaggagaatcgcttgaacctgggaagtggaggttggcagtgagccaaaatcgcaccactgcgctctagcctgggtgacagagcaagactctgtctcaaaaactatatgtgtgtgtgtgtgtgtgtgtgtgtgtgtgtgtgtgtgtacatatatatacatattcacagaattgtgccaccatcaccacagtttcagattgctttcatcaccccctaaagaaagcctgcaccctttagctgtcaccccctgcccagtccccaccttcccagtcctaagaaccactaccctgcttctgtctatagatttccctcttctattccgagctttcatatgaatggactcatgcagaggtggccatcgtgactggctcctgtccctggacacaatgttctcaaagctcgtccacgttgtagctttgttaggacttccttccttttgtggctgaaggatgctccattgtgtggctcaaccacattttatatttgtgccttcatctgctgacgggcgcttgtgctgttttcctgctccggctctgcagagccgtgctgccgggcacttcctgtccaggtttctgtgtggacacagtgcttcagtgtgtgaagccatctgctcattttttgttgttgtttgagacggagtctcactctgtcgcccaggctggaggcctggagtgcagtggcgagatctcggctcactgtaaccacaccccccgtcctgggttcaagtgattctcctgcctcagtctcccgaatagctgggactacagttgcccaccaccacacccagctcttttttttttttttttttttttgagacagagttttgctgttgttgcccaggctggagtgcaatggcgagatttcggctcaccgctaactccaccttccaggttcaagcgattctcctgcctcagcctcccgagtagctgggattacagggatgcaccaccatgcctggctaatgttttttgtatttttagtagagataggctttctccatgttggtcaggctggtctcgaactcccgacctcaggtgatccgcccgcctcggcctcccaaaatgctgggattacaggcatgagccaccgcgcccagcctaatttttgtatttttagtagagatggggtttcaccatgttggccaggctggtcttgaactcctggccttaggtgatccgcccacctcagcctcccaaaatgctgagattacaggcgtgagccactgtgcccggtgacatcatccactcatttgctcctccagacgcttctctggggaggaaccgttactctcccccttgtgcaggtcaggacttgggtgatgagttgtcaggtgactaacccgacagcaaatgcaagaccattggcccagtatgcgctgccggctccattgcttttgatcatgaaccccacccccagcagagcttggccagtttgagacaatgaggggcccaggaaagctgggtcaggggtaagcaagggcacaggaagagacgaagagaggtcctggaagtcccagtgagacgtttggactttgggtgagaacaggaaatcctgggagagagttgagcagggaagcaacaggtgtgatctatgcttttgggaggtgaccccagctgcggtgcggagaatgatcagtctcagggggcttgaggcagcaggtagaggaattgagagagtggagtgagcctccaggtgaggagatggtggaggtgaggtggagatggtggaggtgaggtagagatggaggaggaggacaggttcagatggctgctgtctcgccgacccgtgcatgccacgcctcagcccacacacgcccttggctgaagggctcccagggagatgggtatggagtccctggcttcgtacaaggagaggaaaaacaaaacttgcccaggaaccttgggatgtgaaggagaggaaacagctgggggggtttatttttatttttatttttatttttgagacgaagtttcgctcttgttgcccaggctggagtgcaatggtgcaatctcggctcactgcaacctctgcctcccgggttcaagcaattctcctacctcagcctcccgagtagctgagattacaggcatgcgccaccacacccagctaattttttgtatttttagtagagacggggtttctccatgttggtcatgctggtctcgaactcccgacctcaggtgatctgcccaccttggcctcccaaagtgctgggagtacaggcatgagccaccgcgcccggccacagctgggggttttaacaagaagacggtcatggggcagagcaagagacgaaacgaagagaatgaaacaggcagagggtgttaattctggtggagtcagaggggaactggggactggtggcacacgcacaggaaagccccagatggggtactgggcaacagccactgaaatttgggatgtacttactcttcaacccagccattctgcttccagaacttggtcttgtaatagttaaacaagcacacgcggtgtatgcaagggtgttagttgcaacatcagacccatgtctcaaattccggaaacatcctaaataaccagcagtctggacttaagtaaatcttggtgcattccacttatgaaatctttgcattcatcaaaaaagacaagaggcctagggccgggtgtggtggctgaaacctgtaatcccagcactttgggaggccgaggcaggtggatcacctgaggtcaggagttcgagaccagcctgaccaacatggagaaaccccatctctactaaaaatacaaaattagctgggcgtggtggcgcatgcccgtaatccgagcttcttgggaggctgaggcaggagaatcacttgaacctgggaggtggaggttgcggtgagccgagatcgcgccactgcactccaatctgggtgacagaatgagaccccatcacaaaaaaaaagaaaaaagaaaaaaagtaggtctgtccgtatgtgttgacagggaaagatgtctacaatgcaggtaaaatgatagagtgtgggctgggcttggtggctcacgcccataaccccggctacttgggaggctgaggcaagagaattgcttgaacctgggaggtggagggtgcaatgagattggctcacagcaatctcttcctctcgggttcaagtgattctcctgcctcagcctcccgagtagctggaactacaggaatgaggcactatgcctggctaatttttgtattttagtagagatggtgtttcactgtgttggccaggctagtctcgaactcctgaccttaagtgatccatccaccttggtctcccaaagtgttgggattgtacgtgtaagccaccacacacagctgtgtgattttttttttttttcaatgagcatatgccacttttattgttaaacagtgttctcactatgggggagaaaagtgccagacaggtggcagtttcagttatcttttttttttgagacattttctcactctgtcgcccaggctggagtgcagtggcatgatcttggctcactgcaacctctgcctcctgggttcaagcaattctcgtgcctcagcctcccaagtagctgggattataggcatgcgccaccacacctggctaattttgtatttttagtagagacagggttttaccatgttggccaggctggtctcaaactcctgacctcaggtgatccacctacctcggcctcccaaagtgctgggattacaggcatgagccacgcacccagccagttttagttatctttgaaaaatgaactggggctgggcacagtgagcttgcacctgtaatcccagcacttgggaggccaaggcaggcagatggcttaagcccaggagttccagaccagcctggctaacatggagagacccccacctctacagaaaaaagacaagaaaaataaactgggtggccttgggggacagggaccagcacagtaggtttctcatctctcggcccacctcggcctccccaagtgctggtattacaggtgtgagccaccgtccctggcctgcatcttcatgctcttttcagggtttggttcttgcctcaagcggagagatcagaaattgaatgaggtagtaagttgaggacctcccagacccatatggtccgggatgcaaatgatggtcagaaatagacctcactccaaccactgggcctgaggttcagcctggttcaggctgggtttagtccccagggatggtttgtttttggttttgtgtgtgtgtgtgtgtgtgtgtgtgtgtgtgtgtgtgtgtgtgtgtgtgttttcagacagagtcttgctctgtcgccaggctggagtgcagtggcgcgatctcggcttactataaccgctgcctcctgggttcaagccatcctgcctcagcctcccgagtagctgggattacaggcacgtgccaccacgcctagctaattttttgtatttttagtagagacggggtttcaccatgttggccaggatggtctcgatctcctgacctcgtgatccccccacctcggcctcccaaagtgctgggattacaggcgtgagccaccgcgcccagccgcccagagatgtttgaaccaactttaggcaagttggttcttggtctgggctgcgtgccctggcgtcagggtcctgacactgcgccaccccgcaccgcccaccgctgctctcccggtctccattccagccctcccgcctcctgcccacaatggcctctgctgacaagaatggcgggagcgtgtcctctgtgtccagcagccgcctgcagagccggaagccacccaacctctccatcaccatcccgccacccgagaaagagacccaggcccctggcgagcaggacagcatgctgcctgaggtaagggggctggcctgggggctcactgttctgccgtaggtaacagatgtacccacgtgacactttctggtcagtttcacttcccagaggggctccttcctgagccacagctgctgtctgtgcagcccttgactcgggccctaccccctccttcctgggcccgaaatatcacagggagtaaagccaggaaccgggctcactctcatcgtggtcaggggcacacaggaagggccagccccaagaaagtgcttgctggtaaccctggggccctggctgttctcatttcaccccctaggcctggactctcagtctctcttctgagggctgggggctttctttgacatgggtgagcaggggacagtgtctccctggcatcagcagcccgcctaggcagtgtccgcttcctttgggaggacgagaacagatcagtgtttctgacagtctggtctagtgccccataaagagctcattgaaaaccggcttgtggcagcgtgggcttcctgcacagtctggagtataaagggaagcgatgttaacgccccccgttcacccgagagctctgcagaagacacagcagcaggcaggagcgtcatggtgcagaggggagggactggatgaggagttaggaaaacacacgctggccttgacggagaaaagttagacaatggcgattttaaattcagaatgaggctgggcgaggtcgcctcatgcctgtaatctcatcactttgggaggctgaggcagccagatcacttgagcccaggagttcgagaccagactagacaacatagcaagactctgtctctgcaaaaaaaattaaaaaagagctgggtgtggtggcacatgcctgtaatcccagctacttaggacactgaggtagaaggcttgcttgagcctgggaggtcgaggctccagtgagctatgatggtgccactgccctccaacctgggcaacagagcaagactctgtcccaaaaaatatatatataggccgggcatggtagctcatgcctgtaatcccagcactttgggaggccgaggcggccagatcacttgaggtcaggcaggagttcgagaccagcctggccaacatggtgaaaccccgtctctactaaaaatacaaaaattagccgggtgtggtggcacatgcctatagtcccagctactcaggaggctgaggcagaagaatcgcttgaacctgggaggcggaggtgtcagtgagtcgagaccacaccactgcactccagcctggacaatacagtgagattccatctccaaaaaaaaaaaaaaaaaaaaaaaaaaaatatatatatatatatatatacatatacaaacacacacacacacacacacacacacacacacacattatatatatatatttccaaatgaaagcaaattggggcataaatcagggttgaagtttgttctcagggttttcagaataggaggctaaagaaaagccagcccaggacctgggctgcacacaccaccgcctgccctccctccttcctccccaagaggaagaacccagcctacttgaagagcgtcagcctccaggagccacgcagccgatggcaggagagttcagag

SEQ ID NO: 13750 - DNA, 613 bp, Homo sapiens
gaggagccaccgcccagccgctcgcaggcgccgcacggagttgcgtcccggggacttggggccgcagggaggttcccagaccagaggactgttgttaggtgattggctgtgaacaccctgaggccagtgcccctcgctgcttggcactcggagatgcctgattagcacctttaatcccttaccagtgaggcaggtggaattggccccattttacagatggggagactgagccacctgtctgtccagccacccttccacagactgaggcttgacaccggagcatctgtacagagcaaggagaagacaagaacatgctctaaagcccttcacagcaagacccaggaagccgcgggcaaactcagactcgaagccctcccgcctcctgcccacaatggcctctgctgacaagaatggcgggagcgtgtcctctgtgtccagcagccgcctgcagagccggaagccacccaacctctccatcaccatcccgccacccgagaaagagacccaggcccctggcgagcaggacagcatgctgcctgagaggaagaacccagcctacttgaagagcgtcagcctccaggagccacgcagccgatggcaggagagttcagag

SEQ ID NO: 13751 - DNA, 1262 bp, Homo sapiens
ctgcccttcctcaaccctgaggtcccagatcagttctacaggctctggctgtctctcttcctacatgctgggtaagaggctcctcactgcccccgaacccgacccctgtgatggccacccagccggacccctggggaaaggttcctgggccagggcatggccggcccaacctgccgaagcctactgctcctgaagtgcctggctgaaggccgctgcctggtgtgtccctcccccagcgtggtgcactgcctcgtgtctgtggtctttcaaatgaccatcctgagggacctggagaagctggccggctggcaccgtatcgccatcatcttcatcctcagtggcatcacaggcaacctcgccagtgccatctttctcccataccgggcagaggtaaggatgtggaggatgggaccccttccgcacatagggggccagccctgctgctcctattccacccacctgggatctgccagagggacacggtgcccctcctgtactgggctccacagcggagggacagctaatctgggggcttactggctggtctcttaatcccagtgagagggaacagtgatgctcttgagtcaccctgtccctccaccgcctcatttatcttcctaaccgtgcccactgcctgacagtatgctaggtatctgcaggtcgagcggtaggaaatggcctccgtgcgccgtcggcagtctgatcagttccacctgactgatctagtttgttcagtgtccgtcctctccccaccgtgtgcggcctggaacaggcttgtctgtcttgcttattgctacggacccacaccaggcacgtacacagtaggcgctcagtgtttgctgaaagaatgggcggagcaggcccagctttggtccagcagctccagccgaccccctgcccctcagcctcaggggtccccatgcctgccagggaggagctgatcgatgggatgacccagggtgcaggcccggcccaggccacccacctgatgcctgaagccacgtctcccctgccccgccccaggtgggcccggccggctcacagttcggcctcctcgcctgcctcttcgtggagctcttccagagctggccgctgctggagaggccctggaaggccttcctcaacctctcggccatcgtgctcttcctgttcatctgtggcctcctgccctggatcgacaacatcgcccacatcttcggcttcctcagtggcctgctgctggccttcgccttcctgccctacatcaccttcggcaccagcga

SEQ ID NO: 13752 - DNA, 582 bp, Homo sapiens
ctgcccttcctcaaccctgaggtcccagatcagttctacaggctctggctgtctctcttcctacatgctggcgtggtgcactgcctcgtgtctgtggtctttcaaatgaccatcctgagggacctggagaagctggccggctggcaccgtatcgccatcatcttcatcctcagtggcatcacaggcaacctcgccagtgccatctttctcccataccgggcagagcctcaggggtccccatgcctgccagggaggagctgatcgatgggatgacccagggtgcaggcccggcccaggccacccacctgatgcctgaagccacgtctcccctgccccgccccaggtgggcccggccggctcacagttcggcctcctcgcctgcctcttcgtggagctcttccagagctggccgctgctggagaggccctggaaggccttcctcaacctctcggccatcgtgctcttcctgttcatctgtggcctcctgccctggatcgacaacatcgcccacatcttcggcttcctcagtggcctgctgctggccttcgccttcctgccctacatcaccttcggcaccagcga

SEQ ID NO: 13753 - DNA, 2109 bp, Homo sapiens
actataaccgctgcctcctgggttcaagccatcctgcctcagcctcccgagtagctgggattacaggcacgtgccaccacgcctagctaattttttgtatttttagtagagacggggtttcaccatgttggccaggatggtctcgatctcctgacctcgtgatccccccacctcggcctcccaaagtgctgggattacaggcgtgagccaccgcgcccagccgcccagagatgtttgaaccaactttaggcaagttggttcttggtctgggctgcgtgccctggcgtcagggtcctgacactgcgccaccccgcaccgcccaccgctgctctcccggtctccattccagccctcccgcctcctgcccacaatggcctctgctgacaagaatggcgggagcgtgtcctctgtgtccagcagccgcctgcagagccggaagccacccaacctctccatcaccatcccgccacccgagaaagagacccaggcccctggcgagcaggacagcatgctgcctgaggtaagggggctggcctgggggctcactgttctgccgtaggtaacagatgtacccacgtgacactttctggtcagtttcacttcccagaggggctccttcctgagccacagctgctgtctgtgcagcccttgactcgggccctaccccctccttcctgggcccgaaatatcacagggagtaaagccaggaaccgggctcactctcatcgtggtcaggggcacacaggaagggccagccccaagaaagtgcttgctggtaaccctggggccctggctgttctcatttcaccccctaggcctggactctcagtctctcttctgagggctgggggctttctttgacatgggtgagcaggggacagtgtctccctggcatcagcagcccgcctaggcagtgtccgcttcctttgggaggacgagaacagatcagtgtttctgacagtctggtctagtgccccataaagagctcattgaaaaccggcttgtggcagcgtgggcttcctgcacagtctggagtataaagggaagcgatgttaacgccccccgttcacccgagagctctgcagaagacacagcagcaggcaggagcgtcatggtgcagaggggagggactggatgaggagttaggaaaacacacgctggccttgacggagaaaagttagacaatggcgattttaaattcagaatgaggctgggcgaggtcgcctcatgcctgtaatctcatcactttgggaggctgaggcagccagatcacttgagcccaggagttcgagaccagactagacaacatagcaagactctgtctctgcaaaaaaaattaaaaaagagctgggtgtggtggcacatgcctgtaatcccagctacttaggacactgaggtagaaggcttgcttgagcctgggaggtcgaggctccagtgagctatgatggtgccactgccctccaacctgggcaacagagcaagactctgtcccaaaaaatatatatataggccgggcatggtagctcatgcctgtaatcccagcactttgggaggccgaggcggccagatcacttgaggtcaggcaggagttcgagaccagcctggccaacatggtgaaaccccgtctctactaaaaatacaaaaattagccgggtgtggtggcacatgcctatagtcccagctactcaggaggctgaggcagaagaatcgcttgaacctgggaggcggaggtgtcagtgagtcgagaccacaccactgcactccagcctggacaatacagtgagattccatctccaaaaaaaaaaaaaaaaaaaaaaaaaaaatatatatatatatatatatacatatacaaacacacacacacacacacacacacacacacacacattatatatatatatttccaaatgaaagcaaattggggcataaatcagggttgaagtttgttctcagggttttcagaataggaggctaaagaaaagccagcccaggacctgggctgcacacaccaccgcctgccctccctccttcctccccaagaggaagaacccagcctacttgaagagcgtcagcctccaggagccacgcagccgatggcaggagagttca

SEQ ID NO: 13754 - DNA, 589 bp, Homo sapiens
actataaccgctgcctcctgggttcaagccatcctgcctcagcctcccgagtagctgggattacaggcacgtgccaccacgcctagctaattttttgtatttttagtagagacggggtttcaccatgttggccaggatggtctcgatctcctgacctcgtgatccccccacctcggcctcccaaagtgctgggattacaggcgtgagccaccgcgcccagccgcccagagatgtttgaaccaactttaggcaagttggttcttggtctgggctgcgtgccctggcgtcagggtcctgacactgcgccaccccgcaccgcccaccgctgctctcccggtctccattccagccctcccgcctcctgcccacaatggcctctgctgacaagaatggcgggagcgtgtcctctgtgtccagcagccgcctgcagagccggaagccacccaacctctccatcaccatcccgccacccgagaaagagacccaggcccctggcgagcaggacagcatgctgcctgagaggaagaacccagcctacttgaagagcgtcagcctccaggagccacgcagccgatggcaggagagttca

SEQ ID NO: 13755 - DNA, 3599 bp, Homo sapiens
acttggcctgaggatgagggcgctggaagaaggggatgggagattgggtgctttttcttgatggggaggggcgacttgaagacggcaatcaagacctagatgacgtgtttggtctggggtggagtgaggacgccaagagggaaaggacggcgccctgaagagaccagctcaggcgaaaacagggctctgcccaggcggggacccagctgggtggagggcggaggcaggaacccaggaagccgactgagcaaagactgcgtccaggccccgcccccatgagcccggccacgccccctggagcccagccccgcctcccggccgcccgcgcgcagctgtgagtacccaggaagctgcaccgtgtggcctggagctgtctatctgtccttccagccacctgtctgtccagccacccttccacagactgaggcttgacaccggagcatctgtacagagcaaggagaagacaagaacatgctctaaagcccttcacagcaagacccaggaagccgcgggcaaactcagactcgaagccctcccgcctcctgcccacaatggcctctgctgacaagaatggcgggagcgtgtcctctgtgtccagcagccgcctgcagagccggaagccacccaacctctccatcaccatcccgccacccgagaaagagacccaggcccctggcgagcaggacagcatgctgcctgagaggaagaacccagcctacttgaagagcgtcagcctccaggagccacgcagccgatggcaggagagttcagagaagcgccctggcttccgccgccaggcctcactgtcccagagcatccgcaagggcgcagcccagtggtttggagtcagcggcgactgggaggggcagcggcagcagtggcagcgccgcagcctgcaccactgcagcatgcgctacggccgcctgaaggcctcgtgccagcgtgacctggagctccccagccaggaggcaccgtccttccagggcactgagtccccaaagccctgcaagatgcccaagattgtggatccgctggcccggggccgggccttccgccacccggaggagatggacaggccccacgccccgcacccaccgctgacccccggagtcctgtccctcacctccttcaccagtgtccgttctggctactcccacctgccacgccgcaagagaatgtctgtggcccacatgagcttgcaagctgccgctgccctcctcaaggggcgctcggtgctggatgccaccggacagcggtgccgggtggtcaagcgcagctttgccttcccgagcttcctggaggaggatgtggtcgatggggcagacacgtttgactcctccttttttagtaaggaagaaatgagctccatgcctgatgatgtctttgagtcccccccactctctgccagctacttccgagggatcccacactcagcctcccctgtctcccccgatggggtgcaaatccctctgaaggagtatggccgagccccagtccccgggccccggcgcggcaagcgcatcgcctccaaggtgaagcactttgcctttgatcggaagaagcggcactacggcctcggcgtggtgggcaactggctgaaccgcagctaccgccgcagcatcagcagcactgtgcagcggcagctggagagcttcgacagccaccggccctacttcacctactggctgaccttcgtccatgtcatcatcacgctgctggtgatttgcacgtatggcatcgcacccgtgggctttgcccagcacgtcaccacccagctggtgctgcggaacaaaggtgtgtacgagagcgtgaagtacatccagcaggagaacttctgggttggccccagctcgattgacctgatccacctgggggccaagttctcaccctgcatccggaaggacgggcagatcgagcagctggtgctgcgcgagcgagacctggagcgggactcaggctgctgtgtccagaatgaccactccggatgcatccagacccagcggaaggactgctcggagactttggccacttttgtcaagtggcaggatgacactgggccccccatggacaagtctgatctgggccagaagcggacttcgggggctgtctgccaccaggaccccaggacctgcgaggagccagcctccagcggtgcccacatctggcccgatgacatcactaagtggccgatctgcacagagcaggccaggagcaaccacacaggcttcctgcacatggactgcgagatcaagggccgcccctgctgcatcggcaccaagggcagctgtgagatcaccacccgggaatactgtgagttcatgcacggctatttccatgaggaagcaacactctgctcccaggtgcactgcttggacaaggtgtgtgggctgctgcccttcctcaaccctgaggtcccagatcagttctacaggctctggctgtctctcttcctacatgctggcgtggtgcactgcctcgtgtctgtggtctttcaaatgaccatcctgagggacctggagaagctggccggctggcaccgtatcgccatcatcttcatcctcagtggcatcacaggcaacctcgccagtgccatctttctcccataccgggcagaggtgggcccggccggctcacagttcggcctcctcgcctgcctcttcgtggagctcttccagagctggccgctgctggagaggccctggaaggccttcctcaacctctcggccatcgtgctcttcctgttcatctgtggcctcctgccctggatcgacaacatcgcccacatcttcggcttcctcagtggcctgctgctggccttcgccttcctgccctacatcaccttcggcaccagcgacaagtaccgcaagcgggcactcatcctggtgtcactgctggcctttgccggcctcttcgccgccctcgtgctgtggctgtacatctaccccattaactggccctggatcgagcacctcacctgcttccccttcaccagccgcttctgcgagaagtatgagctggaccaggtgctgcactgaccgctgggccacacggctgcccctcagccctgctggaacagggtctgcctgcgagggctgccctctgcagagcgctctctgtgtgccagagagccagagacccaagacagggcccgggctctggacctgggtgcccccctgccaggcgaggctgactccgcgtgagatggttggttaaggcggggtttttctggggcgtgaggcctgtgagatcctgacccaagctcaggcacacccaaggcacctgcctctctgagtcttgggtctcagttcctaatatcccgctccttgctgagaccatctcctggggcagggtccttttcttcccaggtcctcagcgctgcctctgctggtgccttctcccccactactactggagcgtgcccttgctggggacgtggctgtgccctcagttgcccccagggctgggtgcccaccatgccccttcctctttctcctcctacctctgccctgtgagcccatccataaggctctcagatgggacattgtgggaaaggctttggccatggtctgggggcagagaacaaggggggagacacaagt

SEQ ID NO: 13756 - DNA, 22331 bp, Homo sapiens
gcccagccgctcgcaggcgccgcacggagttgcgtcccggggacttggggccgcagggaggtgagcgcggggcgacgagcggggcaggactcacggccgcccagccgcaggcgccggaagggtcccgaggttgtgcccgagcctgccctggagcggtggtgcgcggccaggaagggtgcccagtgcccggtgcccgccctgcggagcgcctgggtcccacgtgggctcggctggaggcccgggctggctcagacggcgccggcggggccgctggacccggtctgctggcccctagggctcggctcggacaggacgcctaaggggtccctgggcgacggggcgccagatgtaggggcaagacgattgggcagagatttaaacctccggaggaagagaggagactgcgcagggcagtcccgcctgcgtcccagaagtgcctgcagttcagacccttctctcccctccactttctcccgggtgagcaccgggcggaccggggccgaagtttgttggttgagccagccaaggtggaaacaggtgcgggggtggggatgagggactcacacagcagggctggaccggagctcagaaattggacccaggagtcctgacttctggatggaggggctggggaaggttggccctgggcttgccttttacctgtttggcccctcggatgttcccccagggcattgggatagagacggataagttccctagggtacagaccccgccccactcccacgccagggcgcaaaggaagcctaggttttggccctgccccattccatgaaagattaacggagggggctctagggttggagctactgagagggtggcagcgggtgtgtctgaggagcagaaggcggtggggagctgaccccacttggggagaggctgctgttgcctgggcggctggcatcaggcccccagtgtgtgccatttgctggtaatataatgagaccagcatctgccttattcgaccctcactgtccgtagggcaggcagtggaaagggaggcgtgttttagagctgtggttctcaaccaggggcgactttgcctgccatgggatatttggcaatgttggagtcattttgggtgtcacacacttgggaggggaagtgagtgttgttgttactggcaggtagtgggtagaggccagggacgctaccagacatcttcagggcacggaacagcccacataacgaggaattatccagcccaaggtgttgggctgtgctgaggctgagaaaccctgcgcagcagctggtccatcaggttccttctcaatgatgctccctcactggggaaactacctcagttttccagagtggttaggggaggaacttggaataaacctgaatgagatgaggggtaaggcagtgtgagggcacttattcccctcacaagagtcttcctttggtgccatgagacaccgcctttcccaatctccactggccctgcaggaagctggtctaggtgctgtgggggagaggttgggaacagaggacccccttgcagcccaggcctggggtgcttaaccccagggcaatctcccaggaaggctgggctgaggcagcccttgagctcaaatatccctgggctgggagggtgggcagagggcgagctctcttcccatagattttcccaaagctggattgctgaagctggcatggttgcctgataccatgtgacctgctggaattttcccttctgaactcacacctaactcctccaattatgtacaccttttgaaagtgacatccaaggagtatcagggctcctaattcctggggggtccccaggctgcttttgtcctgcaataaagagggcaccctgggttagctgacgagccctggagtgggcccagctgctgatggggtggaggcacccctgcccatggtgttagctgagcagaggtgagagatgggagacatcaaagcacaggccaggtggccccccagtagggatgactcagagttgtttgtattgggctggaggaatgtacttccagttttctggcaacaaggaggggtggctggcacggtgggagaggatcggatgaagcagccacgtccatgcccaggagctggggccacctcgctgccctccctccctgttttcttgcagtagccattatacccatcctgttcacttctggacccagccttcttgcctgggaaccctggtggaggtttcgagcttgggttctttttgttggtgttggtggcttttgttttttttgttttgttttgtttttgtttttgtttttttggtctcttgactgtaaaaggctgaagtgaaactcccaccttttcatttgcacaaaaaacaaaagtggcctccattgctgtgagcctctcaagggacagggctgagcacccaggcttgtacaaagttgttcaggaagtcggcagtggagctcgggtgtgaacccagttgcccaccctcaggccccacccaagagccccacgaacaaaccctcagtgactcctacctgtctgtacctggtgtaaccacacacacacacagacacacacaaacagacacacagagacacacacaaacacacagacacacacagactcacacacacacacacacacacacacacacacacactctctttctctccagcccaggagggggacttttgttcctataagaggaggaataaatcacactacaaatgctttgggtgacgcacttggggcccgagtcctgctctggggtcagtggtgctgtttttcctgtggcctcagctctggatactgtggtggcctctccaccaaggtttctgtccttgctgtgtaaactctgccccagacaaggtgacagatgacagcagaagtcaaggagctgtgcacgcctgcccgtgagtgtgcgagtggcatggctcagctggctggtgcttccctttgggcctggcccccgcctgccgctggcacagcacagggaagacgtgtgccctcctggctgcctctccccctccacactctcctcagatctctgtgcctcgcactctggagcaggcctcggcgctgccccatctgccccaggggatttccagagtgagctcaggcatctgcaccggctgtggaagcgctggctgtcggaagcggctcccagtttcctatccagctgagccaggctgggggaggagtggcggggacgtctgcgcctgcccaagtacaggctgacctcggcggtggtggtggctaggcagggacagctctcagggcacgggcggcttcacagggaaaccaagcctgcccggaacgtcgttttgcctcccaggagacctaggatgggtgtaaggaaaaacacatcttccgggaagtacaaagcgccaccgtgtccacggcccctccttcagcaaatgtatccgggcgcccagctgggagttgtttgtggtccaaaagctactggaaggcagttccagccccagtgcccggctcctgcaggaaagtggtttcagccaagtgggcagtgcaggaggtgggccagagacactgtttggagtgtgaggggaaccttgtgaccagcagaaaaggatggaggaggattccaaacttcaggagctgggccaaggtccaggggctgctgggcacagtcgtccatgtgtgtgctcagtaggatgagttcacttaattagtctgtgcctcagtttccccagctgcacagtgggctcactaacagtaatctacctggagggttgtgtgaggtgaggactcccgtggtaaaggtgtgcagcctgcagtgcagtgcccggccatggcaggagcagtgcggggagccatcgtgataatggtgttagggtggcttcaggtaggggcgtggctgccggtccatggcacagacttgggagatggccgaggccctgcctcgtgggctgtcaaggactagatgggaacacgcatatggagcagtggcactgttgttattgttattctgtaggagtggctgtgtctggggtagggggacctcagtgccttgctggccaagggaagtgagggtgggtttccatctgggcatgaactgctgacctctgcccaggggttttcctggcctgccagtgtgtgtgtgtcactgacagtggggtggggggcagctcatggagttggtgcccctcagctgtgctttccctggcgtaggttcctggggctgggagcagggtaaagctgcctcaagtcttggttttctcctctgcctcccccgtgtggccgccaaccctgtgccagcaggtggtgcagggatggcttcctgccccggtctctggcaagaaacccttttccctctcccagtgggtctccccaggttgtcagctccatttagtcataagaagatctggggccaggcgcggtggctcacgcctgtaatcccagcactttgggaggctgaagcaggcagtcacaaggtcaggagatcgggaccatcctggctaatacggtgaaaccccgtctctactaaaaatacaaaaaaattagccaggtgtggtggcatgcacctgtagtcccagctactcaggaggctgaggcaggagaatcgcttgaacccagaaggcagagcttacagtgagccgagatcaccctactgcactccagcctgggcagcagagcgagactccgtctcaaaaaataaaagaaaaaaaaaagagatctggaagaggagggttgaggatctgctgtggggtttggagtgggaacaggactttgaaccctggcctaagccccttttgaccttgccagcccgtgaggatgatgacagccgcctctcacccttagcctcaactaaatgagatcatgtctgtaaaagtcctttgcaagctgagcagtgctgcccaggcagttaggtgctgtcccttcttcatgaatcaaaggcctttgcatgcaggactcactccagcaccccaaacactcagagtcctcacccgttctttttctcctgcccctcaccagttccagggtggcaagaggctgcagagtgtggaggttaagagcgcgggaccctggctggggttgtagccccaccacctccctaactgtgggaccttggacaggtgacttcatctctctgagcctcagtttccccacctgtcgaatagagatctgtcccctgtggggctcgtggctcagatagagactaagtgagcgatggtggcagagctcagccaggaataaaagaaacttccaactgggcgttgggtgtgtgccaggcactgtacattcatatctgctgtcatcttccctggctccctccgtggtggggcatcaacccatctcacagcagaggaggcaggctctgcagcacccacttgcccaaagtctcccagcaggtaggtggcccaggcaggtttgagtcccatctctggccccttattcctcctcattcctcagcaagagagctccacgctgccccgaagcaaggtgtgggccataagcacgtggctttgcaggcctgcttgggacaagcaacctggtgtccccgtgtcctgaaaccctggcagtcactggggctagggccagcctcttccctgggaagcagggagccccagggcaacgttctgggaaatcaggtttattagttccttaatgaccgtttacaagctcagaagtgtctgcctggcattttccctccctgctgaggggctccatgcagccggaggcagaactgggcctccagaagcgctctgagtgtgtcgaggtgagggcccagggatgccgtcggctccctgggctctgcatgctcacacccagccagtccaggcctatttctggctgggtggcactgggcaaggtgcttacctctctgtacaataggtgagaccttgtacctcagctgagctgttcctggggtgagccctcgttcatggtgacaaagtcacatagatcttagaccctgggaggatactagcatcttatgcatacacaaactgaggctcagagatgttaagtggcttgcccaagatcgcacagtggttagagatgggcctgtgaccctgtcttctgccatcgggacagattttcactgtctggaggcaggtggaaaccgggtgggctcctactttgtaagcacaggacagtgccctgtctgtgtacatgggacagtcacaaacggaaatggcctggtcacaccttagtgtcaaggagcctccagcaggagtgaaacggacctctcacacagaccccaggctgcatctcatcctgccccaaccgctgggcttgtgctggaccaccactgcttccaaggacccgtgaaaacccggctgccgggatgcagagaggcagactttcatgaacgtttgcagcaaagggcagttcccaccgagcctgtgttgctgtggcactgtgtggtgcacaccccaccccggaaaccctccagtgtcctggtgtctgaccccaaatggacagggccttttggcccccaggggccacttctgactcctccccttcacaacgatgctgagggagcaggagaactggggcccggctgctgtgcgtgcccccttcccttcattgccccaaagcctgcagtccagccccaggctcgggagctgctgcctcttccctgggatgtggaaggcacctgcatccccgcccagctgctgccacttgcctgcctccatcagcagctttgttttattttgtctgtgtgttttttgagatggagtcttgctctgtcgcccaggctggagtgcagtggcgtgatctcggctcacttcaacctccgcctcccaggttcaagcgattcttctgcctcagcctcctcagtagctgggattacaggcacccgccaccatgcctggctaatttttgtatttttagtagagatggggtttcaccatgttggccaggctagtctagaactcctgacctcaggtgatctgcccacctcagcctcccaaagtgctgggattacaggtgtgagccactgtgcccagcctccaccagcagcttttgaaatccagaaatttccaggggagggcactgtggtgggtggggcccagcgctgtgtccagctcgaggcctggctgcactgccacctcctttggtgcccacccctgtgtcttgccagcagctgctgcacattgggcttcggggatgcaggactccagcacccccagctcagcctgcttcctggaccaggaaccccagccgaggagggggcatttgtatctctgccatccctgctggcaactggtcctgagaaagcccagatggttggtgcagagggggcgtcaggggctgcaccaccctaagaacatgacatgtcaccccccagccccccgcaacacacacacacaggttcacacctcacacccctgatcttggcggctccctggagcacagcacccgcttcccgtgtctgtggttggcttatgacgccccagccactctaaccgggttaaggggagcccagagcctggggccggataggaaaaagcccagagaagtcaggggatggtcagtcccctgaagctgcccctgggggttcttgatcttctgaactgagttcgaggcaagccctggaggggcgaggaggagaaagaaacagctctctgggccaggacccgctgttcgtgggatgtctggggagctgtgtgaacccacaggccgttttgtttctctccatcagcagctgtgggctgaagcgtgtaccggcggagtgggttgagatcgtgtctgcgcccacttgccaccagctccggcctctggggaggtggtgctgagagggagggagagtggctcctgtttggctcctggagacagacagctgggtgtcccaccctcagagtccccagccccctctcccctctgctaactctgccggtggagctcacgccgcagctcatgccaaccctgcccttctgttttgcctctcatgactctccccaaattctgcccccaggcccccagccagccttcttgccactttcctgccctttactcttgccccttctacctcttgccagggcagcgtcactggctacgtgaggcccagcttggggatgcatggggaggtgtaagaacagctgtgccatgagctgtccttccgggcctctggggctggagaaaccccggggtcagcagtaccacgggttttgctggggattgcacagtgggtgaggctcagcttcctctttgcagctttctaaaaatgccctggttcccagcagggccacaggcagggaaaatgagtttcagtttctgtggcaagggagctggggagagaagcagtttccttgtccccagccctcaccctagcatcctgtgattcagccgcgaagacgtggccccaagcctcccaccgccctccttctgtcctgactgcccactcccagggacaccaggtgacgcctcgcccacccgcggctccggagccaggctggaagcagcttcccgcccagggggtggtttccccacatcctgtcttcagatggcttgagccccctaaacttcctggtcatatccagtggataataatggtctccctctttcctgtctggaggggagggggctgcttacttcttatccaagggcctgtcccgtcccacccctgtgtccccatttctggccacacgcaggctcagcccttgcatcaagcctctgcctgtttccctctgggctgcacctgtcacgctctccctgccctgccccataaagcccatagagcccagggcttgtggggactgcacccttcattagcaagactcagagcttctagaaacccacttgtgtgggggtggggagtgcagggagattggtggcaccaggtggagagagggaactgcacctgggggagttgggaggggcagtgggctgggcccgcgtggaggagtgtggcttgtacagtccgcatggcggggggacccttgtaccctgcctggactggctggtagagctgttggggacctccctgggggtggccttgcttacccagctgtgcggaacaggcttggttgggagtgcctggcctcaccctttgtggggaaaccagattctctgggcagcagtggtaaatggtgtctgagtctgtgtttcgttggatgtgtctgaggtccgctgctgccagctgggttatgctgtctccaaagctatctgcagtgggggaggccctgagcctgggcaggggagggtacagaggcctcaacccatgggacctgggggtgatctgaactctgcacttcactttttttcaggatttcccccgccccaccctaaaggaggaggaaatagagtctgtcccaccctaagccccagtccctctccccaggtctctttggcatctcccagctgggctggggctgaaggcccttctctggggttggccacagtgaggccaggatctggctgggcaggtggcagtgttccgcctgtgggctgggtgcggaggcgggcctgggggtcttagagagagagcggcggatgtgactgcgggccaggaggaagcctggtcccaggatgtcaccatttcccctgcagtgagcaagcatctctagggctcggagataagtgctgggtggggtagctccagctctccagcgcttttttctgtctggttcctgccatctggacttgagccatgaggaaggccagagtgggtctgacagtccccactcctttccccgctgagccccaaggaaggggctgggcctttgcacccccaccccaacttctgcacgagttggaggcagttgatctcaatggtggaaagtggctggtgcaaagtcatgcttccatactccatgtttaggcttcatgggtgtcaaagctgggccgtgaccttgtcccattccctcagagaagggaactgaggccagagggtggagctgctctcaggccgctgcccaggcctcttgtgctctgcggttcagatggcactcccgatgccaggctcctgcccaggaagacatgcccacccgccctggccctgtctctgctgtctggtgtcaggccacctctcttcgggacccccccccaactgattgccctggggctgaccaggctctcctctccctcagtgttgggttttgggagcctctctcatcaggaggttggcacagatgccagccatgcagcggatcctgggcaggggtctcagctgggatggcctggccttgggacagggaggctggctgggcagaaccctagaaccaaaagcggtgcctgtggtgggctagggagctaggtggggagtctagtggggagtctagtggggaggtccactagacactcgttctggcacagcatgcagcgtcctccatcctggccctgctgtgggtacggagccagcagggcaggagctctcagtggagccctccaaagagggctgcttcctggaccagctgcaggatgagggagaccccttctgtccagggctgacataggctgaccaccgccagccccaccctctcactagcttcccattcagttagccattgatgagggctcactgggtgcaggatcctgggctgcccggggttgggtaggggactcctacatgtaggtaaatccgcgagatgctggagagagcaggcaataaagtggttgattctctctggaggtgacattttactttcctagtagggcttggccaggcaggcaaggtggagcctggtgtgccaggcgcagcgcttcagatgagaggaggtgagagcttggggatggcacagggaagtgttttgtctggtgagggtgtggcagggagggcaggcctgaagggacctccagggaggtgtgatcagatctgggttccagaaagatcctacctgcttggcgaccttaactgagctggagtctggaggccccacccttgcacccagctgcttccactgcttgcctcccatcccccagtgccagttccccagggcagtgccctccccatgccctcttggtgtaccctggtcccaaaggaggccaagctatgaacttttcttgcagaggtcccaggtgaggctgttgtcctggagctgtccccagagcaggcttaggatgaggggacctagccacagcttcaaccgagtggggtcccggtgtggctgccagggctccttggcaccaacccagcccagtgggttgatctctgaggacctcgtcatactcagccgggcagtctgccctggggggtggggtcaggactccccagcacttcgggatggaaggaggcgaagccagcgctgctggactagccttaaagaagcgggagacatcctagctccgcctcaagatttctcctctgcacccagcattctgctccccaaatgtcccaaatatgcagggggtcaaggaacattgctcagtggaatcaatggggagcgtgggctactccccagcctctggtttgccccatagcagccccttgggcaccgctggggacccccaggcctctgaggagcttggtttggaaagcgctggaatgctggaccaagttccctctctggctccctgagagggggtcttctagccccagtcttagggcaagaggagcccgtcccctaggagcctccaggccctggagccagacatcgggcgtcctagctacaccctttcctggctatgtgagcttgggcaagttaccaaacccctctgagcctccattcaccatctacagaatggaagagacgctaatgtcaccctggaaggtgttttgaagggtaatgtgtgtaaagggccaaacaaggccccgcacagttaaggacttaaatcctgcccggccccgggagggcttccggcatcttggggttcccctcaaaggatggcctgggcaggacttcttaaaaacaaacaggcggctgggcgcggtggctcacgcctgtaatcccagcactttgggaggccgaggcaggcggatcacgaggtcaggggatcgagaccatcctggctaacatggtgaaaccccgtctctactaaaagtataaaaaattagccgggtgtggtggcgggcgtctgtagtcccagctcctccggaggctgaggcaggagaatggcgtgaacccgggaggcggtgcttgaagggagctgagatcatgccactgcactccagcctgggctacagagcgagactccatctcaaaaaaaaaaaaaaaacaggaatgcccctgggtttcgtgctttaaaatggttgattttatgttgtgtgacttttaagttcaataaattaccaatcaaagcaacaaaacacttccagatcatttgaactttgccttaagtatcagaaggcagttagtaattcctggactttgaatgttaaatatgtggggttcttttgttttgttttgttttgtttcgagacggagtcttgctctgtcacccaggctggagtgcagtggcgcgatctcggctcactgcaacctccatctcccgggttcaagtaactctcctgcctcagcctcccgagtagctgggattacaggcccaccacacccagctaattattttgttgtttttggttttggttttggttgtgagacagagtctcacactgtcatctgggctggagtacaatggcgcgatcttggctcactgcaacctccgcctcccatgtttaagtgattctcctgcctcagcctcctgagtagctgggattacaggcgcccgccaccacacccggctacttttttgtatttttagtagagatggggtttcactatgttggccagactggtctcgaactcctgacctcgtgatccaccctcctcagcctcccaaagtgctgggattacaggcgtgagccactgcacccagccccggctaatttttgtattcttagtagagacagggtttcaccatgttggccaggctggtctcgaactcttgacctcatgattcccccaccttggcctcccaaagtgctgggattacaggtgtgagcgcctgcaccctgcccaaaaatatgtggttttgtttgttttttgaggcagagtctccctctgtcgcccaggctggagtgtaatggcacaatctcggctcactgcaacctccgcctcccaggttcaagcaattctcctgcctcaacctcccgagtagctgggactaaaggtgtgcaccaccatacccagctaacttttgtatttttagtagagatgggtttttaccatgttggccaggccgatctcgaactcctgacctcaggtgatccacctgcctcagcctcccaaaatgctgggattacaggtgtgagctactgcccctggccgaaagttaaatgtttctgttctgttcaagtaatattgagaaaaataacaggggccatcttgactctaatgttctgctccaatcaggttcccagaccagaggactgttgttaggtgattggctgtgaacaccctgaggccagtgcccctcgctgcttggcactcggagatgcctgattagcacctttaatcccttaccagtgaggcaggtggaattggccccattttacagatggggagactgaggtgaggaaggttaaagcactcagtggtgggcatgccccctggagccggccctcctttcttccagctgtgagtacccaggaagctgcaccgtgtggcctggagctgtctatctgtccttccagccacctgtctgtccagccacccttccacagactgaggcttgacaccggagcatctgtacagagcaaggagaagacaagaacatgctctaaagcccttcacagcaagacccaggaagccgcgggcaaactcagactcgaaggtaggaagctgggcggccgggtggctggacccagggcgctggctgctgtgcccacgtccagatacctcctgcggggcccacgctctctgtctgaacagcggtggacagtgaatgaagaaagtcaattcagggagcgagagggaggaataagggcagggaagggacgggcgcggtggctcacgcctgtaatcccagcattttgggaggccgaggtgagtggatcacctgaggtcaggagttcgagactggcctggccaacatggcaaaaccccatctctactaaaaatacaaaaaatttagctgggcgtggtggtgcgcgcctgtagtcccagctacttgggaggctgaggcaggagaatcgctcgaacctgggaggcagaggttgcagtgagccaagatcatgccactgcactccagcctgggctgcagagtgagactacatctcaaaaaaaaaaaaaatttgccaggcatgctggctcacgcctgtaatccaagcactttgggaggccaaggcgggtggaggccaggagtttgagaccagcctgaccaacatggagaaacccagtctctactaaaaaatacaaaattagctgggcatggcggtgcatgcctgtaatcccaactactcgggaggctgaggcaggagaattgcttgaacccaggaggcggaggctgcagtgagctcagatcgtgccactgcactccagcctgggcaacaagaatgaaactcagtctcaaaaaaaaaaaaaaaaaaaaaaaggcaggaagcgaggtgggaccggcactgctcaaggtggggcaggagggcacttgaactgcaaccaggaggctgagaagagccagcccctcctctgtgtgatggtctgggacagagtgactggctcggacagaggcccaacattatggagcacctgcttcattgagagagaattcacacaccagtcgattcacccatttaaagtgtaccatcagtgtttttatttatttatttatattttgagacagggtctcactctgttacccaggctggagtacagtggcgcgatcacggttcactgcagcctcgaccttcctagctcaagccatccttctgcctcagcctcctgagtagctgggactatatgcacgcaccaccatatctggctaattttttaatttttttatacagatgggatctcactatgttgctcaggctggtcttgaactcctgggctcaagtgatcttcctgcctcagtctctcaaattgctgggattacaggcatgaaccaccgctcccaaccttcagtgattttgatatattcacagaggctgggcacagtggctcacacctgtaatctcagcactttctgagaggccgaagcaaacttgaggtaaggagttcgagactagcctggccaacatggtgaaaccccatctctactaaagatacaaacattacccaggcatggtggcttgcgcctgtagtcccagctactcgggagactgaggcaggagaatcgcttgaacctgggaagtggaggttggcagtgagccaaaatcgcaccactgcgctctagcctgggtgacagagcaagactctgtctcaaaaactatatgtgtgtgtgtgtgtgtgtgtgtgtgtgtgtgtgtgtgtacatatatatacatattcacagaattgtgccaccatcaccacagtttcagattgctttcatcaccccctaaagaaagcctgcaccctttagctgtcaccccctgcccagtccccaccttcccagtcctaagaaccactaccctgcttctgtctatagatttccctcttctattccgagctttcatatgaatggactcatgcagaggtggccatcgtgactggctcctgtccctggacacaatgttctcaaagctcgtccacgttgtagctttgttaggacttccttccttttgtggctgaaggatgctccattgtgtggctcaaccacattttatatttgtgccttcatctgctgacgggcgcttgtgctgttttcctgctccggctctgcagagccgtgctgccgggcacttcctgtccaggtttctgtgtggacacagtgcttcagtgtgtgaagccatctgctcattttttgttgttgtttgagacggagtctcactctgtcgcccaggctggaggcctggagtgcagtggcgagatctcggctcactgtaaccacaccccccgtcctgggttcaagtgattctcctgcctcagtctcccgaatagctgggactacagttgcccaccaccacacccagctcttttttttttttttttttttttgagacagagttttgctgttgttgcccaggctggagtgcaatggcgagatttcggctcaccgctaactccaccttccaggttcaagcgattctcctgcctcagcctcccgagtagctgggattacagggatgcaccaccatgcctggctaatgttttttgtatttttagtagagataggctttctccatgttggtcaggctggtctcgaactcccgacctcaggtgatccgcccgcctcggcctcccaaaatgctgggattacaggcatgagccaccgcgcccagcctaatttttgtatttttagtagagatggggtttcaccatgttggccaggctggtcttgaactcctggccttaggtgatccgcccacctcagcctcccaaaatgctgagattacaggcgtgagccactgtgcccggtgacatcatccactcatttgctcctccagacgcttctctggggaggaaccgttactctcccccttgtgcaggtcaggacttgggtgatgagttgtcaggtgactaacccgacagcaaatgcaagaccattggcccagtatgcgctgccggctccattgcttttgatcatgaaccccacccccagcagagcttggccagtttgagacaatgaggggcccaggaaagctgggtcaggggtaagcaagggcacaggaagagacgaagagaggtcctggaagtcccagtgagacgtttggactttgggtgagaacaggaaatcctgggagagagttgagcagggaagcaacaggtgtgatctatgcttttgggaggtgaccccagctgcggtgcggagaatgatcagtctcagggggcttgaggcagcaggtagaggaattgagagagtggagtgagcctccaggtgaggagatggtggaggtgaggtggagatggtggaggtgaggtagagatggaggaggaggacaggttcagatggctgctgtctcgccgacccgtgcatgccacgcctcagcccacacacgcccttggctgaagggctcccagggagatgggtatggagtccctggcttcgtacaaggagaggaaaaacaaaacttgcccaggaaccttgggatgtgaaggagaggaaacagctgggggggtttatttttatttttatttttatttttgagacgaagtttcgctcttgttgcccaggctggagtgcaatggtgcaatctcggctcactgcaacctctgcctcccgggttcaagcaattctcctacctcagcctcccgagtagctgagattacaggcatgcgccaccacacccagctaattttttgtatttttagtagagacggggtttctccatgttggtcatgctggtctcgaactcccgacctcaggtgatctgcccaccttggcctcccaaagtgctgggagtacaggcatgagccaccgcgcccggccacagctgggggttttaacaagaagacggtcatggggcagagcaagagacgaaacgaagagaatgaaacaggcagagggtgttaattctggtggagtcagaggggaactggggactggtggcacacgcacaggaaagccccagatggggtactgggcaacagccactgaaatttgggatgtacttactcttcaacccagccattctgcttccagaacttggtcttgtaatagttaaacaagcacacgcggtgtatgcaagggtgttagttgcaacatcagacccatgtctcaaattccggaaacatcctaaataaccagcagtctggacttaagtaaatcttggtgcattccacttatgaaatctttgcattcatcaaaaaagacaagaggcctagggccgggtgtggtggctgaaacctgtaatcccagcactttgggaggccgaggcaggtggatcacctgaggtcaggagttcgagaccagcctgaccaacatggagaaaccccatctctactaaaaatacaaaattagctgggcgtggtggcgcatgcccgtaatccgagcttcttgggaggctgaggcaggagaatcacttgaacctgggaggtggaggttgcggtgagccgagatcgcgccactgcactccaatctgggtgacagaatgagaccccatcacaaaaaaaaagaaaaaagaaaaaaagtaggtctgtccgtatgtgttgacagggaaagatgtctacaatgcaggtaaaatgatagagtgtgggctgggcttggtggctcacgcccataaccccggctacttgggaggctgaggcaagagaattgcttgaacctgggaggtggagggtgcaatgagattggctcacagcaatctcttcctctcgggttcaagtgattctcctgcctcagcctcccgagtagctggaactacaggaatgaggcactatgcctggctaatttttgtattttagtagagatggtgtttcactgtgttggccaggctagtctcgaactcctgaccttaagtgatccatccaccttggtctcccaaagtgttgggattgtacgtgtaagccaccacacacagctgtgtgattttttttttttttcaatgagcatatgccacttttattgttaaacagtgttctcactatgggggagaaaagtgccagacaggtggcagtttcagttatcttttttttttgagacattttctcactctgtcgcccaggctggagtgcagtggcatgatcttggctcactgcaacctctgcctcctgggttcaagcaattctcgtgcctcagcctcccaagtagctgggattataggcatgcgccaccacacctggctaattttgtatttttagtagagacagggttttaccatgttggccaggctggtctcaaactcctgacctcaggtgatccacctacctcggcctcccaaagtgctgggattacaggcatgagccacgcacccagccagttttagttatctttgaaaaatgaactggggctgggcacagtgagcttgcacctgtaatcccagcacttgggaggccaaggcaggcagatggcttaagcccaggagttccagaccagcctggctaacatggagagacccccacctctacagaaaaaagacaagaaaaataaactgggtggccttgggggacagggaccagcacagtaggtttctcatctctcggcccacctcggcctccccaagtgctggtattacaggtgtgagccaccgtccctggcctgcatcttcatgctcttttcagggtttggttcttgcctcaagcggagagatcagaaattgaatgaggtagtaagttgaggacctcccagacccatatggtccgggatgcaaatgatggtcagaaatagacctcactccaaccactgggcctgaggttcagcctggttcaggctgggtttagtccccagggatggtttgtttttggttttgtgtgtgtgtgtgtgtgtgtgtgtgtgtgtgtgtgtgtgtgtgtgtgtgttttcagacagagtcttgctctgtcgccaggctggagtgcagtggcgcgatctcggcttactataaccgctgcctcctgggttcaagccatcctgcctcagcctcccgagtagctgggattacaggcacgtgccaccacgcctagctaattttttgtatttttagtagagacggggtttcaccatgttggccaggatggtctcgatctcctgacctcgtgatccccccacctcggcctcccaaagtgctgggattacaggcgtgagccaccgcgcccagccgcccagagatgtttgaaccaactttaggcaagttggttcttggtctgggctgcgtgccctggcgtcagggtcctgacactgcgccaccccgcaccgcccaccgctgctctcccggtctccattccagccctcccgcctcctgcccacaatggcctctgctgacaagaatggcgggagcgtgtcctctgtgtccagcagccgcctgcagagccggaagccacccaacctctccatcaccatcccgccacccgagaaagagacccaggcccctggcgagcaggacagcatgctgcctgaggtaagggggctggcctgggggctcactgttctgccgtaggtaacagatgtacccacgtgacactttctggtcagtttcacttcccagaggggctccttcctgagccacagctgctgtctgtgcagcccttgactcgggccctaccccctccttcctgggcccgaaatatcacagggagtaaagccaggaaccgggctcactctcatcgtggtcaggggcacacaggaagggccagccccaagaaagtgcttgctggtaaccctggggccctggctgttctcatttcaccccctaggcctggactctcagtctctcttctgagggctgggggctttctttgacatgggtgagcaggggacagtgtctccctggcatcagcagcccgcctaggcagtgtccgcttcctttgggaggacgagaacagatcagtgtttctgacagtctggtctagtgccccataaagagctcattgaaaaccggcttgtggcagcgtgggcttcctgcacagtctggagtataaagggaagcgatgttaacgccccccgttcacccgagagctctgcagaagacacagcagcaggcaggagcgtcatggtgcagaggggagggactggatgaggagttaggaaaacacacgctggccttgacggagaaaagttagacaatggcgattttaaattcagaatgaggctgggcgaggtcgcctcatgcctgtaatctcatcactttgggaggctgaggcagccagatcacttgagcccaggagttcgagaccagactagacaacatagcaagactctgtctctgcaaaaaaaattaaaaaagagctgggtgtggtggcacatgcctgtaatcccagctacttaggacactgaggtagaaggcttgcttgagcctgggaggtcgaggctccagtgagctatgatggtgccactgccctccaacctgggcaacagagcaagactctgtcccaaaaaatatatatataggccgggcatggtagctcatgcctgtaatcccagcactttgggaggccgaggcggccagatcacttgaggtcaggcaggagttcgagaccagcctggccaacatggtgaaaccccgtctctactaaaaatacaaaaattagccgggtgtggtggcacatgcctatagtcccagctactcaggaggctgaggcagaagaatcgcttgaacctgggaggcggaggtgtcagtgagtcgagaccacaccactgcactccagcctggacaatacagtgagattccatctccaaaaaaaaaaaaaaaaaaaaaaaaaaaatatatatatatatatatatacatatacaaacacacacacacacacacacacacacacacacacattatatatatatatttccaaatgaaagcaaattggggcataaatcagggttgaagtttgttctcagggttttcagaataggaggctaaagaaaagccagcccaggacctgggctgcacacaccaccgcctgccctccctccttcctccccaagaggaagaacccagcctacttgaagagcgtcagcctccaggagccacgcagccgatggcaggagagttcagagaagcgccctggcttccgccgccaggcctcactgtcccagagcatccgcaagtgagcccccctacacccaagcccagcaccccccacccagcaacctgtggattctcggggcctggacatgattgggcctggtccctgcgtcccctctctggaaggaggaggccggcattaatgagcaatgtctccctgtggcctattatcatggtatagatggggaaatgggtatgtgctttgcggaatatcacggtgtggaggctggggggcttcgaggagctgggtggatcagtgtgggggtgcctggggccctagcctggctcctcacgctcccgtcatcccctgcttctgctcatctggtcactgggctccagccaggggcctcacaggcagatccgccccccacctccctgtaggcacgcgggcacacacgtgccatcaccccttccacacactcaggtgcacaggcgtagacaagcgtatgcccacctgtcccttgtctgcttccgcaggggcgcagcccagtggtttggagtcagcggcgactgggaggggcagcggcagcagtggcagcgccgcagcctgcaccactgcagcatgcgctacggccgcctgaaggcctcgtgccagcgtgacctggagctccccagccaggaggcaccgtccttccagggcactgagtccccaaagccctgcaagatgcccaag

SEQ ID NO: 13757 - DNA, 935 bp, Homo sapiens
gcccagccgctcgcaggcgccgcacggagttgcgtcccggggacttggggccgcagggaggttcccagaccagaggactgttgttaggtgattggctgtgaacaccctgaggccagtgcccctcgctgcttggcactcggagatgcctgattagcacctttaatcccttaccagtgaggcaggtggaattggccccattttacagatggggagactgagccacctgtctgtccagccacccttccacagactgaggcttgacaccggagcatctgtacagagcaaggagaagacaagaacatgctctaaagcccttcacagcaagacccaggaagccgcgggcaaactcagactcgaagccctcccgcctcctgcccacaatggcctctgctgacaagaatggcgggagcgtgtcctctgtgtccagcagccgcctgcagagccggaagccacccaacctctccatcaccatcccgccacccgagaaagagacccaggcccctggcgagcaggacagcatgctgcctgagggttttcagaataggaggctaaagaaaagccagcccaggacctgggctgcacacaccaccgcctgccctccctccttcctccccaagaggaagaacccagcctacttgaagagcgtcagcctccaggagccacgcagccgatggcaggagagttcagagaagcgccctggcttccgccgccaggcctcactgtcccagagcatccgcaagggcgcagcccagtggtttggagtcagcggcgactgggaggggcagcggcagcagtggcagcgccgcagcctgcaccactgcagcatgcgctacggccgcctgaaggcctcgtgccagcgtgacctggagctccccagccaggaggcaccgtccttccagggcactgagtccccaaagccctgcaagatgcccaag

SEQ ID NO: 13758 - DNA, 22239 bp, Homo sapiens
gttgcgtcccggggacttggggccgcagggaggtgagcgcggggcgacgagcggggcaggactcacggccgcccagccgcaggcgccggaagggtcccgaggttgtgcccgagcctgccctggagcggtggtgcgcggccaggaagggtgcccagtgcccggtgcccgccctgcggagcgcctgggtcccacgtgggctcggctggaggcccgggctggctcagacggcgccggcggggccgctggacccggtctgctggcccctagggctcggctcggacaggacgcctaaggggtccctgggcgacggggcgccagatgtaggggcaagacgattgggcagagatttaaacctccggaggaagagaggagactgcgcagggcagtcccgcctgcgtcccagaagtgcctgcagttcagacccttctctcccctccactttctcccgggtgagcaccgggcggaccggggccgaagtttgttggttgagccagccaaggtggaaacaggtgcgggggtggggatgagggactcacacagcagggctggaccggagctcagaaattggacccaggagtcctgacttctggatggaggggctggggaaggttggccctgggcttgccttttacctgtttggcccctcggatgttcccccagggcattgggatagagacggataagttccctagggtacagaccccgccccactcccacgccagggcgcaaaggaagcctaggttttggccctgccccattccatgaaagattaacggagggggctctagggttggagctactgagagggtggcagcgggtgtgtctgaggagcagaaggcggtggggagctgaccccacttggggagaggctgctgttgcctgggcggctggcatcaggcccccagtgtgtgccatttgctggtaatataatgagaccagcatctgccttattcgaccctcactgtccgtagggcaggcagtggaaagggaggcgtgttttagagctgtggttctcaaccaggggcgactttgcctgccatgggatatttggcaatgttggagtcattttgggtgtcacacacttgggaggggaagtgagtgttgttgttactggcaggtagtgggtagaggccagggacgctaccagacatcttcagggcacggaacagcccacataacgaggaattatccagcccaaggtgttgggctgtgctgaggctgagaaaccctgcgcagcagctggtccatcaggttccttctcaatgatgctccctcactggggaaactacctcagttttccagagtggttaggggaggaacttggaataaacctgaatgagatgaggggtaaggcagtgtgagggcacttattcccctcacaagagtcttcctttggtgccatgagacaccgcctttcccaatctccactggccctgcaggaagctggtctaggtgctgtgggggagaggttgggaacagaggacccccttgcagcccaggcctggggtgcttaaccccagggcaatctcccaggaaggctgggctgaggcagcccttgagctcaaatatccctgggctgggagggtgggcagagggcgagctctcttcccatagattttcccaaagctggattgctgaagctggcatggttgcctgataccatgtgacctgctggaattttcccttctgaactcacacctaactcctccaattatgtacaccttttgaaagtgacatccaaggagtatcagggctcctaattcctggggggtccccaggctgcttttgtcctgcaataaagagggcaccctgggttagctgacgagccctggagtgggcccagctgctgatggggtggaggcacccctgcccatggtgttagctgagcagaggtgagagatgggagacatcaaagcacaggccaggtggccccccagtagggatgactcagagttgtttgtattgggctggaggaatgtacttccagttttctggcaacaaggaggggtggctggcacggtgggagaggatcggatgaagcagccacgtccatgcccaggagctggggccacctcgctgccctccctccctgttttcttgcagtagccattatacccatcctgttcacttctggacccagccttcttgcctgggaaccctggtggaggtttcgagcttgggttctttttgttggtgttggtggcttttgttttttttgttttgttttgtttttgtttttgtttttttggtctcttgactgtaaaaggctgaagtgaaactcccaccttttcatttgcacaaaaaacaaaagtggcctccattgctgtgagcctctcaagggacagggctgagcacccaggcttgtacaaagttgttcaggaagtcggcagtggagctcgggtgtgaacccagttgcccaccctcaggccccacccaagagccccacgaacaaaccctcagtgactcctacctgtctgtacctggtgtaaccacacacacacacagacacacacaaacagacacacagagacacacacaaacacacagacacacacagactcacacacacacacacacacacacacacacacacactctctttctctccagcccaggagggggacttttgttcctataagaggaggaataaatcacactacaaatgctttgggtgacgcacttggggcccgagtcctgctctggggtcagtggtgctgtttttcctgtggcctcagctctggatactgtggtggcctctccaccaaggtttctgtccttgctgtgtaaactctgccccagacaaggtgacagatgacagcagaagtcaaggagctgtgcacgcctgcccgtgagtgtgcgagtggcatggctcagctggctggtgcttccctttgggcctggcccccgcctgccgctggcacagcacagggaagacgtgtgccctcctggctgcctctccccctccacactctcctcagatctctgtgcctcgcactctggagcaggcctcggcgctgccccatctgccccaggggatttccagagtgagctcaggcatctgcaccggctgtggaagcgctggctgtcggaagcggctcccagtttcctatccagctgagccaggctgggggaggagtggcggggacgtctgcgcctgcccaagtacaggctgacctcggcggtggtggtggctaggcagggacagctctcagggcacgggcggcttcacagggaaaccaagcctgcccggaacgtcgttttgcctcccaggagacctaggatgggtgtaaggaaaaacacatcttccgggaagtacaaagcgccaccgtgtccacggcccctccttcagcaaatgtatccgggcgcccagctgggagttgtttgtggtccaaaagctactggaaggcagttccagccccagtgcccggctcctgcaggaaagtggtttcagccaagtgggcagtgcaggaggtgggccagagacactgtttggagtgtgaggggaaccttgtgaccagcagaaaaggatggaggaggattccaaacttcaggagctgggccaaggtccaggggctgctgggcacagtcgtccatgtgtgtgctcagtaggatgagttcacttaattagtctgtgcctcagtttccccagctgcacagtgggctcactaacagtaatctacctggagggttgtgtgaggtgaggactcccgtggtaaaggtgtgcagcctgcagtgcagtgcccggccatggcaggagcagtgcggggagccatcgtgataatggtgttagggtggcttcaggtaggggcgtggctgccggtccatggcacagacttgggagatggccgaggccctgcctcgtgggctgtcaaggactagatgggaacacgcatatggagcagtggcactgttgttattgttattctgtaggagtggctgtgtctggggtagggggacctcagtgccttgctggccaagggaagtgagggtgggtttccatctgggcatgaactgctgacctctgcccaggggttttcctggcctgccagtgtgtgtgtgtcactgacagtggggtggggggcagctcatggagttggtgcccctcagctgtgctttccctggcgtaggttcctggggctgggagcagggtaaagctgcctcaagtcttggttttctcctctgcctcccccgtgtggccgccaaccctgtgccagcaggtggtgcagggatggcttcctgccccggtctctggcaagaaacccttttccctctcccagtgggtctccccaggttgtcagctccatttagtcataagaagatctggggccaggcgcggtggctcacgcctgtaatcccagcactttgggaggctgaagcaggcagtcacaaggtcaggagatcgggaccatcctggctaatacggtgaaaccccgtctctactaaaaatacaaaaaaattagccaggtgtggtggcatgcacctgtagtcccagctactcaggaggctgaggcaggagaatcgcttgaacccagaaggcagagcttacagtgagccgagatcaccctactgcactccagcctgggcagcagagcgagactccgtctcaaaaaataaaagaaaaaaaaaagagatctggaagaggagggttgaggatctgctgtggggtttggagtgggaacaggactttgaaccctggcctaagccccttttgaccttgccagcccgtgaggatgatgacagccgcctctcacccttagcctcaactaaatgagatcatgtctgtaaaagtcctttgcaagctgagcagtgctgcccaggcagttaggtgctgtcccttcttcatgaatcaaaggcctttgcatgcaggactcactccagcaccccaaacactcagagtcctcacccgttctttttctcctgcccctcaccagttccagggtggcaagaggctgcagagtgtggaggttaagagcgcgggaccctggctggggttgtagccccaccacctccctaactgtgggaccttggacaggtgacttcatctctctgagcctcagtttccccacctgtcgaatagagatctgtcccctgtggggctcgtggctcagatagagactaagtgagcgatggtggcagagctcagccaggaataaaagaaacttccaactgggcgttgggtgtgtgccaggcactgtacattcatatctgctgtcatcttccctggctccctccgtggtggggcatcaacccatctcacagcagaggaggcaggctctgcagcacccacttgcccaaagtctcccagcaggtaggtggcccaggcaggtttgagtcccatctctggccccttattcctcctcattcctcagcaagagagctccacgctgccccgaagcaaggtgtgggccataagcacgtggctttgcaggcctgcttgggacaagcaacctggtgtccccgtgtcctgaaaccctggcagtcactggggctagggccagcctcttccctgggaagcagggagccccagggcaacgttctgggaaatcaggtttattagttccttaatgaccgtttacaagctcagaagtgtctgcctggcattttccctccctgctgaggggctccatgcagccggaggcagaactgggcctccagaagcgctctgagtgtgtcgaggtgagggcccagggatgccgtcggctccctgggctctgcatgctcacacccagccagtccaggcctatttctggctgggtggcactgggcaaggtgcttacctctctgtacaataggtgagaccttgtacctcagctgagctgttcctggggtgagccctcgttcatggtgacaaagtcacatagatcttagaccctgggaggatactagcatcttatgcatacacaaactgaggctcagagatgttaagtggcttgcccaagatcgcacagtggttagagatgggcctgtgaccctgtcttctgccatcgggacagattttcactgtctggaggcaggtggaaaccgggtgggctcctactttgtaagcacaggacagtgccctgtctgtgtacatgggacagtcacaaacggaaatggcctggtcacaccttagtgtcaaggagcctccagcaggagtgaaacggacctctcacacagaccccaggctgcatctcatcctgccccaaccgctgggcttgtgctggaccaccactgcttccaaggacccgtgaaaacccggctgccgggatgcagagaggcagactttcatgaacgtttgcagcaaagggcagttcccaccgagcctgtgttgctgtggcactgtgtggtgcacaccccaccccggaaaccctccagtgtcctggtgtctgaccccaaatggacagggccttttggcccccaggggccacttctgactcctccccttcacaacgatgctgagggagcaggagaactggggcccggctgctgtgcgtgcccccttcccttcattgccccaaagcctgcagtccagccccaggctcgggagctgctgcctcttccctgggatgtggaaggcacctgcatccccgcccagctgctgccacttgcctgcctccatcagcagctttgttttattttgtctgtgtgttttttgagatggagtcttgctctgtcgcccaggctggagtgcagtggcgtgatctcggctcacttcaacctccgcctcccaggttcaagcgattcttctgcctcagcctcctcagtagctgggattacaggcacccgccaccatgcctggctaatttttgtatttttagtagagatggggtttcaccatgttggccaggctagtctagaactcctgacctcaggtgatctgcccacctcagcctcccaaagtgctgggattacaggtgtgagccactgtgcccagcctccaccagcagcttttgaaatccagaaatttccaggggagggcactgtggtgggtggggcccagcgctgtgtccagctcgaggcctggctgcactgccacctcctttggtgcccacccctgtgtcttgccagcagctgctgcacattgggcttcggggatgcaggactccagcacccccagctcagcctgcttcctggaccaggaaccccagccgaggagggggcatttgtatctctgccatccctgctggcaactggtcctgagaaagcccagatggttggtgcagagggggcgtcaggggctgcaccaccctaagaacatgacatgtcaccccccagccccccgcaacacacacacacaggttcacacctcacacccctgatcttggcggctccctggagcacagcacccgcttcccgtgtctgtggttggcttatgacgccccagccactctaaccgggttaaggggagcccagagcctggggccggataggaaaaagcccagagaagtcaggggatggtcagtcccctgaagctgcccctgggggttcttgatcttctgaactgagttcgaggcaagccctggaggggcgaggaggagaaagaaacagctctctgggccaggacccgctgttcgtgggatgtctggggagctgtgtgaacccacaggccgttttgtttctctccatcagcagctgtgggctgaagcgtgtaccggcggagtgggttgagatcgtgtctgcgcccacttgccaccagctccggcctctggggaggtggtgctgagagggagggagagtggctcctgtttggctcctggagacagacagctgggtgtcccaccctcagagtccccagccccctctcccctctgctaactctgccggtggagctcacgccgcagctcatgccaaccctgcccttctgttttgcctctcatgactctccccaaattctgcccccaggcccccagccagccttcttgccactttcctgccctttactcttgccccttctacctcttgccagggcagcgtcactggctacgtgaggcccagcttggggatgcatggggaggtgtaagaacagctgtgccatgagctgtccttccgggcctctggggctggagaaaccccggggtcagcagtaccacgggttttgctggggattgcacagtgggtgaggctcagcttcctctttgcagctttctaaaaatgccctggttcccagcagggccacaggcagggaaaatgagtttcagtttctgtggcaagggagctggggagagaagcagtttccttgtccccagccctcaccctagcatcctgtgattcagccgcgaagacgtggccccaagcctcccaccgccctccttctgtcctgactgcccactcccagggacaccaggtgacgcctcgcccacccgcggctccggagccaggctggaagcagcttcccgcccagggggtggtttccccacatcctgtcttcagatggcttgagccccctaaacttcctggtcatatccagtggataataatggtctccctctttcctgtctggaggggagggggctgcttacttcttatccaagggcctgtcccgtcccacccctgtgtccccatttctggccacacgcaggctcagcccttgcatcaagcctctgcctgtttccctctgggctgcacctgtcacgctctccctgccctgccccataaagcccatagagcccagggcttgtggggactgcacccttcattagcaagactcagagcttctagaaacccacttgtgtgggggtggggagtgcagggagattggtggcaccaggtggagagagggaactgcacctgggggagttgggaggggcagtgggctgggcccgcgtggaggagtgtggcttgtacagtccgcatggcggggggacccttgtaccctgcctggactggctggtagagctgttggggacctccctgggggtggccttgcttacccagctgtgcggaacaggcttggttgggagtgcctggcctcaccctttgtggggaaaccagattctctgggcagcagtggtaaatggtgtctgagtctgtgtttcgttggatgtgtctgaggtccgctgctgccagctgggttatgctgtctccaaagctatctgcagtgggggaggccctgagcctgggcaggggagggtacagaggcctcaacccatgggacctgggggtgatctgaactctgcacttcactttttttcaggatttcccccgccccaccctaaaggaggaggaaatagagtctgtcccaccctaagccccagtccctctccccaggtctctttggcatctcccagctgggctggggctgaaggcccttctctggggttggccacagtgaggccaggatctggctgggcaggtggcagtgttccgcctgtgggctgggtgcggaggcgggcctgggggtcttagagagagagcggcggatgtgactgcgggccaggaggaagcctggtcccaggatgtcaccatttcccctgcagtgagcaagcatctctagggctcggagataagtgctgggtggggtagctccagctctccagcgcttttttctgtctggttcctgccatctggacttgagccatgaggaaggccagagtgggtctgacagtccccactcctttccccgctgagccccaaggaaggggctgggcctttgcacccccaccccaacttctgcacgagttggaggcagttgatctcaatggtggaaagtggctggtgcaaagtcatgcttccatactccatgtttaggcttcatgggtgtcaaagctgggccgtgaccttgtcccattccctcagagaagggaactgaggccagagggtggagctgctctcaggccgctgcccaggcctcttgtgctctgcggttcagatggcactcccgatgccaggctcctgcccaggaagacatgcccacccgccctggccctgtctctgctgtctggtgtcaggccacctctcttcgggacccccccccaactgattgccctggggctgaccaggctctcctctccctcagtgttgggttttgggagcctctctcatcaggaggttggcacagatgccagccatgcagcggatcctgggcaggggtctcagctgggatggcctggccttgggacagggaggctggctgggcagaaccctagaaccaaaagcggtgcctgtggtgggctagggagctaggtggggagtctagtggggagtctagtggggaggtccactagacactcgttctggcacagcatgcagcgtcctccatcctggccctgctgtgggtacggagccagcagggcaggagctctcagtggagccctccaaagagggctgcttcctggaccagctgcaggatgagggagaccccttctgtccagggctgacataggctgaccaccgccagccccaccctctcactagcttcccattcagttagccattgatgagggctcactgggtgcaggatcctgggctgcccggggttgggtaggggactcctacatgtaggtaaatccgcgagatgctggagagagcaggcaataaagtggttgattctctctggaggtgacattttactttcctagtagggcttggccaggcaggcaaggtggagcctggtgtgccaggcgcagcgcttcagatgagaggaggtgagagcttggggatggcacagggaagtgttttgtctggtgagggtgtggcagggagggcaggcctgaagggacctccagggaggtgtgatcagatctgggttccagaaagatcctacctgcttggcgaccttaactgagctggagtctggaggccccacccttgcacccagctgcttccactgcttgcctcccatcccccagtgccagttccccagggcagtgccctccccatgccctcttggtgtaccctggtcccaaaggaggccaagctatgaacttttcttgcagaggtcccaggtgaggctgttgtcctggagctgtccccagagcaggcttaggatgaggggacctagccacagcttcaaccgagtggggtcccggtgtggctgccagggctccttggcaccaacccagcccagtgggttgatctctgaggacctcgtcatactcagccgggcagtctgccctggggggtggggtcaggactccccagcacttcgggatggaaggaggcgaagccagcgctgctggactagccttaaagaagcgggagacatcctagctccgcctcaagatttctcctctgcacccagcattctgctccccaaatgtcccaaatatgcagggggtcaaggaacattgctcagtggaatcaatggggagcgtgggctactccccagcctctggtttgccccatagcagccccttgggcaccgctggggacccccaggcctctgaggagcttggtttggaaagcgctggaatgctggaccaagttccctctctggctccctgagagggggtcttctagccccagtcttagggcaagaggagcccgtcccctaggagcctccaggccctggagccagacatcgggcgtcctagctacaccctttcctggctatgtgagcttgggcaagttaccaaacccctctgagcctccattcaccatctacagaatggaagagacgctaatgtcaccctggaaggtgttttgaagggtaatgtgtgtaaagggccaaacaaggccccgcacagttaaggacttaaatcctgcccggccccgggagggcttccggcatcttggggttcccctcaaaggatggcctgggcaggacttcttaaaaacaaacaggcggctgggcgcggtggctcacgcctgtaatcccagcactttgggaggccgaggcaggcggatcacgaggtcaggggatcgagaccatcctggctaacatggtgaaaccccgtctctactaaaagtataaaaaattagccgggtgtggtggcgggcgtctgtagtcccagctcctccggaggctgaggcaggagaatggcgtgaacccgggaggcggtgcttgaagggagctgagatcatgccactgcactccagcctgggctacagagcgagactccatctcaaaaaaaaaaaaaaaacaggaatgcccctgggtttcgtgctttaaaatggttgattttatgttgtgtgacttttaagttcaataaattaccaatcaaagcaacaaaacacttccagatcatttgaactttgccttaagtatcagaaggcagttagtaattcctggactttgaatgttaaatatgtggggttcttttgttttgttttgttttgtttcgagacggagtcttgctctgtcacccaggctggagtgcagtggcgcgatctcggctcactgcaacctccatctcccgggttcaagtaactctcctgcctcagcctcccgagtagctgggattacaggcccaccacacccagctaattattttgttgtttttggttttggttttggttgtgagacagagtctcacactgtcatctgggctggagtacaatggcgcgatcttggctcactgcaacctccgcctcccatgtttaagtgattctcctgcctcagcctcctgagtagctgggattacaggcgcccgccaccacacccggctacttttttgtatttttagtagagatggggtttcactatgttggccagactggtctcgaactcctgacctcgtgatccaccctcctcagcctcccaaagtgctgggattacaggcgtgagccactgcacccagccccggctaatttttgtattcttagtagagacagggtttcaccatgttggccaggctggtctcgaactcttgacctcatgattcccccaccttggcctcccaaagtgctgggattacaggtgtgagcgcctgcaccctgcccaaaaatatgtggttttgtttgttttttgaggcagagtctccctctgtcgcccaggctggagtgtaatggcacaatctcggctcactgcaacctccgcctcccaggttcaagcaattctcctgcctcaacctcccgagtagctgggactaaaggtgtgcaccaccatacccagctaacttttgtatttttagtagagatgggtttttaccatgttggccaggccgatctcgaactcctgacctcaggtgatccacctgcctcagcctcccaaaatgctgggattacaggtgtgagctactgcccctggccgaaagttaaatgtttctgttctgttcaagtaatattgagaaaaataacaggggccatcttgactctaatgttctgctccaatcaggttcccagaccagaggactgttgttaggtgattggctgtgaacaccctgaggccagtgcccctcgctgcttggcactcggagatgcctgattagcacctttaatcccttaccagtgaggcaggtggaattggccccattttacagatggggagactgaggtgaggaaggttaaagcactcagtggtgggcatgccccctggagccggccctcctttcttccagctgtgagtacccaggaagctgcaccgtgtggcctggagctgtctatctgtccttccagccacctgtctgtccagccacccttccacagactgaggcttgacaccggagcatctgtacagagcaaggagaagacaagaacatgctctaaagcccttcacagcaagacccaggaagccgcgggcaaactcagactcgaaggtaggaagctgggcggccgggtggctggacccagggcgctggctgctgtgcccacgtccagatacctcctgcggggcccacgctctctgtctgaacagcggtggacagtgaatgaagaaagtcaattcagggagcgagagggaggaataagggcagggaagggacgggcgcggtggctcacgcctgtaatcccagcattttgggaggccgaggtgagtggatcacctgaggtcaggagttcgagactggcctggccaacatggcaaaaccccatctctactaaaaatacaaaaaatttagctgggcgtggtggtgcgcgcctgtagtcccagctacttgggaggctgaggcaggagaatcgctcgaacctgggaggcagaggttgcagtgagccaagatcatgccactgcactccagcctgggctgcagagtgagactacatctcaaaaaaaaaaaaaatttgccaggcatgctggctcacgcctgtaatccaagcactttgggaggccaaggcgggtggaggccaggagtttgagaccagcctgaccaacatggagaaacccagtctctactaaaaaatacaaaattagctgggcatggcggtgcatgcctgtaatcccaactactcgggaggctgaggcaggagaattgcttgaacccaggaggcggaggctgcagtgagctcagatcgtgccactgcactccagcctgggcaacaagaatgaaactcagtctcaaaaaaaaaaaaaaaaaaaaaaaggcaggaagcgaggtgggaccggcactgctcaaggtggggcaggagggcacttgaactgcaaccaggaggctgagaagagccagcccctcctctgtgtgatggtctgggacagagtgactggctcggacagaggcccaacattatggagcacctgcttcattgagagagaattcacacaccagtcgattcacccatttaaagtgtaccatcagtgtttttatttatttatttatattttgagacagggtctcactctgttacccaggctggagtacagtggcgcgatcacggttcactgcagcctcgaccttcctagctcaagccatccttctgcctcagcctcctgagtagctgggactatatgcacgcaccaccatatctggctaattttttaatttttttatacagatgggatctcactatgttgctcaggctggtcttgaactcctgggctcaagtgatcttcctgcctcagtctctcaaattgctgggattacaggcatgaaccaccgctcccaaccttcagtgattttgatatattcacagaggctgggcacagtggctcacacctgtaatctcagcactttctgagaggccgaagcaaacttgaggtaaggagttcgagactagcctggccaacatggtgaaaccccatctctactaaagatacaaacattacccaggcatggtggcttgcgcctgtagtcccagctactcgggagactgaggcaggagaatcgcttgaacctgggaagtggaggttggcagtgagccaaaatcgcaccactgcgctctagcctgggtgacagagcaagactctgtctcaaaaactatatgtgtgtgtgtgtgtgtgtgtgtgtgtgtgtgtgtgtgtacatatatatacatattcacagaattgtgccaccatcaccacagtttcagattgctttcatcaccccctaaagaaagcctgcaccctttagctgtcaccccctgcccagtccccaccttcccagtcctaagaaccactaccctgcttctgtctatagatttccctcttctattccgagctttcatatgaatggactcatgcagaggtggccatcgtgactggctcctgtccctggacacaatgttctcaaagctcgtccacgttgtagctttgttaggacttccttccttttgtggctgaaggatgctccattgtgtggctcaaccacattttatatttgtgccttcatctgctgacgggcgcttgtgctgttttcctgctccggctctgcagagccgtgctgccgggcacttcctgtccaggtttctgtgtggacacagtgcttcagtgtgtgaagccatctgctcattttttgttgttgtttgagacggagtctcactctgtcgcccaggctggaggcctggagtgcagtggcgagatctcggctcactgtaaccacaccccccgtcctgggttcaagtgattctcctgcctcagtctcccgaatagctgggactacagttgcccaccaccacacccagctcttttttttttttttttttttttgagacagagttttgctgttgttgcccaggctggagtgcaatggcgagatttcggctcaccgctaactccaccttccaggttcaagcgattctcctgcctcagcctcccgagtagctgggattacagggatgcaccaccatgcctggctaatgttttttgtatttttagtagagataggctttctccatgttggtcaggctggtctcgaactcccgacctcaggtgatccgcccgcctcggcctcccaaaatgctgggattacaggcatgagccaccgcgcccagcctaatttttgtatttttagtagagatggggtttcaccatgttggccaggctggtcttgaactcctggccttaggtgatccgcccacctcagcctcccaaaatgctgagattacaggcgtgagccactgtgcccggtgacatcatccactcatttgctcctccagacgcttctctggggaggaaccgttactctcccccttgtgcaggtcaggacttgggtgatgagttgtcaggtgactaacccgacagcaaatgcaagaccattggcccagtatgcgctgccggctccattgcttttgatcatgaaccccacccccagcagagcttggccagtttgagacaatgaggggcccaggaaagctgggtcaggggtaagcaagggcacaggaagagacgaagagaggtcctggaagtcccagtgagacgtttggactttgggtgagaacaggaaatcctgggagagagttgagcagggaagcaacaggtgtgatctatgcttttgggaggtgaccccagctgcggtgcggagaatgatcagtctcagggggcttgaggcagcaggtagaggaattgagagagtggagtgagcctccaggtgaggagatggtggaggtgaggtggagatggtggaggtgaggtagagatggaggaggaggacaggttcagatggctgctgtctcgccgacccgtgcatgccacgcctcagcccacacacgcccttggctgaagggctcccagggagatgggtatggagtccctggcttcgtacaaggagaggaaaaacaaaacttgcccaggaaccttgggatgtgaaggagaggaaacagctgggggggtttatttttatttttatttttatttttgagacgaagtttcgctcttgttgcccaggctggagtgcaatggtgcaatctcggctcactgcaacctctgcctcccgggttcaagcaattctcctacctcagcctcccgagtagctgagattacaggcatgcgccaccacacccagctaattttttgtatttttagtagagacggggtttctccatgttggtcatgctggtctcgaactcccgacctcaggtgatctgcccaccttggcctcccaaagtgctgggagtacaggcatgagccaccgcgcccggccacagctgggggttttaacaagaagacggtcatggggcagagcaagagacgaaacgaagagaatgaaacaggcagagggtgttaattctggtggagtcagaggggaactggggactggtggcacacgcacaggaaagccccagatggggtactgggcaacagccactgaaatttgggatgtacttactcttcaacccagccattctgcttccagaacttggtcttgtaatagttaaacaagcacacgcggtgtatgcaagggtgttagttgcaacatcagacccatgtctcaaattccggaaacatcctaaataaccagcagtctggacttaagtaaatcttggtgcattccacttatgaaatctttgcattcatcaaaaaagacaagaggcctagggccgggtgtggtggctgaaacctgtaatcccagcactttgggaggccgaggcaggtggatcacctgaggtcaggagttcgagaccagcctgaccaacatggagaaaccccatctctactaaaaatacaaaattagctgggcgtggtggcgcatgcccgtaatccgagcttcttgggaggctgaggcaggagaatcacttgaacctgggaggtggaggttgcggtgagccgagatcgcgccactgcactccaatctgggtgacagaatgagaccccatcacaaaaaaaaagaaaaaagaaaaaaagtaggtctgtccgtatgtgttgacagggaaagatgtctacaatgcaggtaaaatgatagagtgtgggctgggcttggtggctcacgcccataaccccggctacttgggaggctgaggcaagagaattgcttgaacctgggaggtggagggtgcaatgagattggctcacagcaatctcttcctctcgggttcaagtgattctcctgcctcagcctcccgagtagctggaactacaggaatgaggcactatgcctggctaatttttgtattttagtagagatggtgtttcactgtgttggccaggctagtctcgaactcctgaccttaagtgatccatccaccttggtctcccaaagtgttgggattgtacgtgtaagccaccacacacagctgtgtgattttttttttttttcaatgagcatatgccacttttattgttaaacagtgttctcactatgggggagaaaagtgccagacaggtggcagtttcagttatcttttttttttgagacattttctcactctgtcgcccaggctggagtgcagtggcatgatcttggctcactgcaacctctgcctcctgggttcaagcaattctcgtgcctcagcctcccaagtagctgggattataggcatgcgccaccacacctggctaattttgtatttttagtagagacagggttttaccatgttggccaggctggtctcaaactcctgacctcaggtgatccacctacctcggcctcccaaagtgctgggattacaggcatgagccacgcacccagccagttttagttatctttgaaaaatgaactggggctgggcacagtgagcttgcacctgtaatcccagcacttgggaggccaaggcaggcagatggcttaagcccaggagttccagaccagcctggctaacatggagagacccccacctctacagaaaaaagacaagaaaaataaactgggtggccttgggggacagggaccagcacagtaggtttctcatctctcggcccacctcggcctccccaagtgctggtattacaggtgtgagccaccgtccctggcctgcatcttcatgctcttttcagggtttggttcttgcctcaagcggagagatcagaaattgaatgaggtagtaagttgaggacctcccagacccatatggtccgggatgcaaatgatggtcagaaatagacctcactccaaccactgggcctgaggttcagcctggttcaggctgggtttagtccccagggatggtttgtttttggttttgtgtgtgtgtgtgtgtgtgtgtgtgtgtgtgtgtgtgtgtgtgtgtgtgttttcagacagagtcttgctctgtcgccaggctggagtgcagtggcgcgatctcggcttactataaccgctgcctcctgggttcaagccatcctgcctcagcctcccgagtagctgggattacaggcacgtgccaccacgcctagctaattttttgtatttttagtagagacggggtttcaccatgttggccaggatggtctcgatctcctgacctcgtgatccccccacctcggcctcccaaagtgctgggattacaggcgtgagccaccgcgcccagccgcccagagatgtttgaaccaactttaggcaagttggttcttggtctgggctgcgtgccctggcgtcagggtcctgacactgcgccaccccgcaccgcccaccgctgctctcccggtctccattccagccctcccgcctcctgcccacaatggcctctgctgacaagaatggcgggagcgtgtcctctgtgtccagcagccgcctgcagagccggaagccacccaacctctccatcaccatcccgccacccgagaaagagacccaggcccctggcgagcaggacagcatgctgcctgaggtaagggggctggcctgggggctcactgttctgccgtaggtaacagatgtacccacgtgacactttctggtcagtttcacttcccagaggggctccttcctgagccacagctgctgtctgtgcagcccttgactcgggccctaccccctccttcctgggcccgaaatatcacagggagtaaagccaggaaccgggctcactctcatcgtggtcaggggcacacaggaagggccagccccaagaaagtgcttgctggtaaccctggggccctggctgttctcatttcaccccctaggcctggactctcagtctctcttctgagggctgggggctttctttgacatgggtgagcaggggacagtgtctccctggcatcagcagcccgcctaggcagtgtccgcttcctttgggaggacgagaacagatcagtgtttctgacagtctggtctagtgccccataaagagctcattgaaaaccggcttgtggcagcgtgggcttcctgcacagtctggagtataaagggaagcgatgttaacgccccccgttcacccgagagctctgcagaagacacagcagcaggcaggagcgtcatggtgcagaggggagggactggatgaggagttaggaaaacacacgctggccttgacggagaaaagttagacaatggcgattttaaattcagaatgaggctgggcgaggtcgcctcatgcctgtaatctcatcactttgggaggctgaggcagccagatcacttgagcccaggagttcgagaccagactagacaacatagcaagactctgtctctgcaaaaaaaattaaaaaagagctgggtgtggtggcacatgcctgtaatcccagctacttaggacactgaggtagaaggcttgcttgagcctgggaggtcgaggctccagtgagctatgatggtgccactgccctccaacctgggcaacagagcaagactctgtcccaaaaaatatatatataggccgggcatggtagctcatgcctgtaatcccagcactttgggaggccgaggcggccagatcacttgaggtcaggcaggagttcgagaccagcctggccaacatggtgaaaccccgtctctactaaaaatacaaaaattagccgggtgtggtggcacatgcctatagtcccagctactcaggaggctgaggcagaagaatcgcttgaacctgggaggcggaggtgtcagtgagtcgagaccacaccactgcactccagcctggacaatacagtgagattccatctccaaaaaaaaaaaaaaaaaaaaaaaaaaaatatatatatatatatatatacatatacaaacacacacacacacacacacacacacacacacacattatatatatatatttccaaatgaaagcaaattggggcataaatcagggttgaagtttgttctcagggttttcagaataggaggctaaagaaaagccagcccaggacctgggctgcacacaccaccgcctgccctccctccttcctccccaagaggaagaacccagcctacttgaagagcgtcagcctccaggagccacgcagccgatggcaggagagttcagagaagcgccctggcttccgccgccaggcctcactgtcccagagcatccgcaagtgagcccccctacacccaagcccagcaccccccacccagcaacctgtggattctcggggcctggacatgattgggcctggtccctgcgtcccctctctggaaggaggaggccggcattaatgagcaatgtctccctgtggcctattatcatggtatagatggggaaatgggtatgtgctttgcggaatatcacggtgtggaggctggggggcttcgaggagctgggtggatcagtgtgggggtgcctggggccctagcctggctcctcacgctcccgtcatcccctgcttctgctcatctggtcactgggctccagccaggggcctcacaggcagatccgccccccacctccctgtaggcacgcgggcacacacgtgccatcaccccttccacacactcaggtgcacaggcgtagacaagcgtatgcccacctgtcccttgtctgcttccgcaggggcgcagcccagtggtttggagtcagcggcgactgggaggggcagcggcagcagtggcagcgccgcagcctgcaccactgcagcatgcgctacggccgcctgaaggcctcgtgccagcgtgacctggagct

SEQ ID NO: 13759 - DNA, 533 bp, Homo sapiens
gttgcgtcccggggacttggggccgcagggagctgtgagtacccaggaagctgcaccgtgtggcctggagctgtctatctgtccttccagccacctgtctgtccagccacccttccacagactgaggcttgacaccggagcatctgtacagagcaaggagaagacaagaacatgctctaaagcccttcacagcaagacccaggaagccgcgggcaaactcagactcgaagccctcccgcctcctgcccacaatggcctctgctgacaagaatggcgggagcgtgtcctctgtgtccagcagccgcctgcagagccggaagccacccaacctctccatcaccatcccgccacccgagaaagagacccaggcccctggcgagcaggacagcatgctgcctgaggggcgcagcccagtggtttggagtcagcggcgactgggaggggcagcggcagcagtggcagcgccgcagcctgcaccactgcagcatgcgctacggccgcctgaaggcctcgtgccagcgtgacctggagct

SEQ ID NO: 13760 - DNA, 14005 bp, Homo sapiens
accgcccagccgctcgcaggcgccgcacggagttgcgtcccggggacttggggccgcagggaggtgagcgcggggcgacgagcggggcaggactcacggccgcccagccgcaggcgccggaagggtcccgaggttgtgcccgagcctgccctggagcggtggtgcgcggccaggaagggtgcccagtgcccggtgcccgccctgcggagcgcctgggtcccacgtgggctcggctggaggcccgggctggctcagacggcgccggcggggccgctggacccggtctgctggcccctagggctcggctcggacaggacgcctaaggggtccctgggcgacggggcgccagatgtaggggcaagacgattgggcagagatttaaacctccggaggaagagaggagactgcgcagggcagtcccgcctgcgtcccagaagtgcctgcagttcagacccttctctcccctccactttctcccgggtgagcaccgggcggaccggggccgaagtttgttggttgagccagccaaggtggaaacaggtgcgggggtggggatgagggactcacacagcagggctggaccggagctcagaaattggacccaggagtcctgacttctggatggaggggctggggaaggttggccctgggcttgccttttacctgtttggcccctcggatgttcccccagggcattgggatagagacggataagttccctagggtacagaccccgccccactcccacgccagggcgcaaaggaagcctaggttttggccctgccccattccatgaaagattaacggagggggctctagggttggagctactgagagggtggcagcgggtgtgtctgaggagcagaaggcggtggggagctgaccccacttggggagaggctgctgttgcctgggcggctggcatcaggcccccagtgtgtgccatttgctggtaatataatgagaccagcatctgccttattcgaccctcactgtccgtagggcaggcagtggaaagggaggcgtgttttagagctgtggttctcaaccaggggcgactttgcctgccatgggatatttggcaatgttggagtcattttgggtgtcacacacttgggaggggaagtgagtgttgttgttactggcaggtagtgggtagaggccagggacgctaccagacatcttcagggcacggaacagcccacataacgaggaattatccagcccaaggtgttgggctgtgctgaggctgagaaaccctgcgcagcagctggtccatcaggttccttctcaatgatgctccctcactggggaaactacctcagttttccagagtggttaggggaggaacttggaataaacctgaatgagatgaggggtaaggcagtgtgagggcacttattcccctcacaagagtcttcctttggtgccatgagacaccgcctttcccaatctccactggccctgcaggaagctggtctaggtgctgtgggggagaggttgggaacagaggacccccttgcagcccaggcctggggtgcttaaccccagggcaatctcccaggaaggctgggctgaggcagcccttgagctcaaatatccctgggctgggagggtgggcagagggcgagctctcttcccatagattttcccaaagctggattgctgaagctggcatggttgcctgataccatgtgacctgctggaattttcccttctgaactcacacctaactcctccaattatgtacaccttttgaaagtgacatccaaggagtatcagggctcctaattcctggggggtccccaggctgcttttgtcctgcaataaagagggcaccctgggttagctgacgagccctggagtgggcccagctgctgatggggtggaggcacccctgcccatggtgttagctgagcagaggtgagagatgggagacatcaaagcacaggccaggtggccccccagtagggatgactcagagttgtttgtattgggctggaggaatgtacttccagttttctggcaacaaggaggggtggctggcacggtgggagaggatcggatgaagcagccacgtccatgcccaggagctggggccacctcgctgccctccctccctgttttcttgcagtagccattatacccatcctgttcacttctggacccagccttcttgcctgggaaccctggtggaggtttcgagcttgggttctttttgttggtgttggtggcttttgttttttttgttttgttttgtttttgtttttgtttttttggtctcttgactgtaaaaggctgaagtgaaactcccaccttttcatttgcacaaaaaacaaaagtggcctccattgctgtgagcctctcaagggacagggctgagcacccaggcttgtacaaagttgttcaggaagtcggcagtggagctcgggtgtgaacccagttgcccaccctcaggccccacccaagagccccacgaacaaaccctcagtgactcctacctgtctgtacctggtgtaaccacacacacacacagacacacacaaacagacacacagagacacacacaaacacacagacacacacagactcacacacacacacacacacacacacacacacacactctctttctctccagcccaggagggggacttttgttcctataagaggaggaataaatcacactacaaatgctttgggtgacgcacttggggcccgagtcctgctctggggtcagtggtgctgtttttcctgtggcctcagctctggatactgtggtggcctctccaccaaggtttctgtccttgctgtgtaaactctgccccagacaaggtgacagatgacagcagaagtcaaggagctgtgcacgcctgcccgtgagtgtgcgagtggcatggctcagctggctggtgcttccctttgggcctggcccccgcctgccgctggcacagcacagggaagacgtgtgccctcctggctgcctctccccctccacactctcctcagatctctgtgcctcgcactctggagcaggcctcggcgctgccccatctgccccaggggatttccagagtgagctcaggcatctgcaccggctgtggaagcgctggctgtcggaagcggctcccagtttcctatccagctgagccaggctgggggaggagtggcggggacgtctgcgcctgcccaagtacaggctgacctcggcggtggtggtggctaggcagggacagctctcagggcacgggcggcttcacagggaaaccaagcctgcccggaacgtcgttttgcctcccaggagacctaggatgggtgtaaggaaaaacacatcttccgggaagtacaaagcgccaccgtgtccacggcccctccttcagcaaatgtatccgggcgcccagctgggagttgtttgtggtccaaaagctactggaaggcagttccagccccagtgcccggctcctgcaggaaagtggtttcagccaagtgggcagtgcaggaggtgggccagagacactgtttggagtgtgaggggaaccttgtgaccagcagaaaaggatggaggaggattccaaacttcaggagctgggccaaggtccaggggctgctgggcacagtcgtccatgtgtgtgctcagtaggatgagttcacttaattagtctgtgcctcagtttccccagctgcacagtgggctcactaacagtaatctacctggagggttgtgtgaggtgaggactcccgtggtaaaggtgtgcagcctgcagtgcagtgcccggccatggcaggagcagtgcggggagccatcgtgataatggtgttagggtggcttcaggtaggggcgtggctgccggtccatggcacagacttgggagatggccgaggccctgcctcgtgggctgtcaaggactagatgggaacacgcatatggagcagtggcactgttgttattgttattctgtaggagtggctgtgtctggggtagggggacctcagtgccttgctggccaagggaagtgagggtgggtttccatctgggcatgaactgctgacctctgcccaggggttttcctggcctgccagtgtgtgtgtgtcactgacagtggggtggggggcagctcatggagttggtgcccctcagctgtgctttccctggcgtaggttcctggggctgggagcagggtaaagctgcctcaagtcttggttttctcctctgcctcccccgtgtggccgccaaccctgtgccagcaggtggtgcagggatggcttcctgccccggtctctggcaagaaacccttttccctctcccagtgggtctccccaggttgtcagctccatttagtcataagaagatctggggccaggcgcggtggctcacgcctgtaatcccagcactttgggaggctgaagcaggcagtcacaaggtcaggagatcgggaccatcctggctaatacggtgaaaccccgtctctactaaaaatacaaaaaaattagccaggtgtggtggcatgcacctgtagtcccagctactcaggaggctgaggcaggagaatcgcttgaacccagaaggcagagcttacagtgagccgagatcaccctactgcactccagcctgggcagcagagcgagactccgtctcaaaaaataaaagaaaaaaaaaagagatctggaagaggagggttgaggatctgctgtggggtttggagtgggaacaggactttgaaccctggcctaagccccttttgaccttgccagcccgtgaggatgatgacagccgcctctcacccttagcctcaactaaatgagatcatgtctgtaaaagtcctttgcaagctgagcagtgctgcccaggcagttaggtgctgtcccttcttcatgaatcaaaggcctttgcatgcaggactcactccagcaccccaaacactcagagtcctcacccgttctttttctcctgcccctcaccagttccagggtggcaagaggctgcagagtgtggaggttaagagcgcgggaccctggctggggttgtagccccaccacctccctaactgtgggaccttggacaggtgacttcatctctctgagcctcagtttccccacctgtcgaatagagatctgtcccctgtggggctcgtggctcagatagagactaagtgagcgatggtggcagagctcagccaggaataaaagaaacttccaactgggcgttgggtgtgtgccaggcactgtacattcatatctgctgtcatcttccctggctccctccgtggtggggcatcaacccatctcacagcagaggaggcaggctctgcagcacccacttgcccaaagtctcccagcaggtaggtggcccaggcaggtttgagtcccatctctggccccttattcctcctcattcctcagcaagagagctccacgctgccccgaagcaaggtgtgggccataagcacgtggctttgcaggcctgcttgggacaagcaacctggtgtccccgtgtcctgaaaccctggcagtcactggggctagggccagcctcttccctgggaagcagggagccccagggcaacgttctgggaaatcaggtttattagttccttaatgaccgtttacaagctcagaagtgtctgcctggcattttccctccctgctgaggggctccatgcagccggaggcagaactgggcctccagaagcgctctgagtgtgtcgaggtgagggcccagggatgccgtcggctccctgggctctgcatgctcacacccagccagtccaggcctatttctggctgggtggcactgggcaaggtgcttacctctctgtacaataggtgagaccttgtacctcagctgagctgttcctggggtgagccctcgttcatggtgacaaagtcacatagatcttagaccctgggaggatactagcatcttatgcatacacaaactgaggctcagagatgttaagtggcttgcccaagatcgcacagtggttagagatgggcctgtgaccctgtcttctgccatcgggacagattttcactgtctggaggcaggtggaaaccgggtgggctcctactttgtaagcacaggacagtgccctgtctgtgtacatgggacagtcacaaacggaaatggcctggtcacaccttagtgtcaaggagcctccagcaggagtgaaacggacctctcacacagaccccaggctgcatctcatcctgccccaaccgctgggcttgtgctggaccaccactgcttccaaggacccgtgaaaacccggctgccgggatgcagagaggcagactttcatgaacgtttgcagcaaagggcagttcccaccgagcctgtgttgctgtggcactgtgtggtgcacaccccaccccggaaaccctccagtgtcctggtgtctgaccccaaatggacagggccttttggcccccaggggccacttctgactcctccccttcacaacgatgctgagggagcaggagaactggggcccggctgctgtgcgtgcccccttcccttcattgccccaaagcctgcagtccagccccaggctcgggagctgctgcctcttccctgggatgtggaaggcacctgcatccccgcccagctgctgccacttgcctgcctccatcagcagctttgttttattttgtctgtgtgttttttgagatggagtcttgctctgtcgcccaggctggagtgcagtggcgtgatctcggctcacttcaacctccgcctcccaggttcaagcgattcttctgcctcagcctcctcagtagctgggattacaggcacccgccaccatgcctggctaatttttgtatttttagtagagatggggtttcaccatgttggccaggctagtctagaactcctgacctcaggtgatctgcccacctcagcctcccaaagtgctgggattacaggtgtgagccactgtgcccagcctccaccagcagcttttgaaatccagaaatttccaggggagggcactgtggtgggtggggcccagcgctgtgtccagctcgaggcctggctgcactgccacctcctttggtgcccacccctgtgtcttgccagcagctgctgcacattgggcttcggggatgcaggactccagcacccccagctcagcctgcttcctggaccaggaaccccagccgaggagggggcatttgtatctctgccatccctgctggcaactggtcctgagaaagcccagatggttggtgcagagggggcgtcaggggctgcaccaccctaagaacatgacatgtcaccccccagccccccgcaacacacacacacaggttcacacctcacacccctgatcttggcggctccctggagcacagcacccgcttcccgtgtctgtggttggcttatgacgccccagccactctaaccgggttaaggggagcccagagcctggggccggataggaaaaagcccagagaagtcaggggatggtcagtcccctgaagctgcccctgggggttcttgatcttctgaactgagttcgaggcaagccctggaggggcgaggaggagaaagaaacagctctctgggccaggacccgctgttcgtgggatgtctggggagctgtgtgaacccacaggccgttttgtttctctccatcagcagctgtgggctgaagcgtgtaccggcggagtgggttgagatcgtgtctgcgcccacttgccaccagctccggcctctggggaggtggtgctgagagggagggagagtggctcctgtttggctcctggagacagacagctgggtgtcccaccctcagagtccccagccccctctcccctctgctaactctgccggtggagctcacgccgcagctcatgccaaccctgcccttctgttttgcctctcatgactctccccaaattctgcccccaggcccccagccagccttcttgccactttcctgccctttactcttgccccttctacctcttgccagggcagcgtcactggctacgtgaggcccagcttggggatgcatggggaggtgtaagaacagctgtgccatgagctgtccttccgggcctctggggctggagaaaccccggggtcagcagtaccacgggttttgctggggattgcacagtgggtgaggctcagcttcctctttgcagctttctaaaaatgccctggttcccagcagggccacaggcagggaaaatgagtttcagtttctgtggcaagggagctggggagagaagcagtttccttgtccccagccctcaccctagcatcctgtgattcagccgcgaagacgtggccccaagcctcccaccgccctccttctgtcctgactgcccactcccagggacaccaggtgacgcctcgcccacccgcggctccggagccaggctggaagcagcttcccgcccagggggtggtttccccacatcctgtcttcagatggcttgagccccctaaacttcctggtcatatccagtggataataatggtctccctctttcctgtctggaggggagggggctgcttacttcttatccaagggcctgtcccgtcccacccctgtgtccccatttctggccacacgcaggctcagcccttgcatcaagcctctgcctgtttccctctgggctgcacctgtcacgctctccctgccctgccccataaagcccatagagcccagggcttgtggggactgcacccttcattagcaagactcagagcttctagaaacccacttgtgtgggggtggggagtgcagggagattggtggcaccaggtggagagagggaactgcacctgggggagttgggaggggcagtgggctgggcccgcgtggaggagtgtggcttgtacagtccgcatggcggggggacccttgtaccctgcctggactggctggtagagctgttggggacctccctgggggtggccttgcttacccagctgtgcggaacaggcttggttgggagtgcctggcctcaccctttgtggggaaaccagattctctgggcagcagtggtaaatggtgtctgagtctgtgtttcgttggatgtgtctgaggtccgctgctgccagctgggttatgctgtctccaaagctatctgcagtgggggaggccctgagcctgggcaggggagggtacagaggcctcaacccatgggacctgggggtgatctgaactctgcacttcactttttttcaggatttcccccgccccaccctaaaggaggaggaaatagagtctgtcccaccctaagccccagtccctctccccaggtctctttggcatctcccagctgggctggggctgaaggcccttctctggggttggccacagtgaggccaggatctggctgggcaggtggcagtgttccgcctgtgggctgggtgcggaggcgggcctgggggtcttagagagagagcggcggatgtgactgcgggccaggaggaagcctggtcccaggatgtcaccatttcccctgcagtgagcaagcatctctagggctcggagataagtgctgggtggggtagctccagctctccagcgcttttttctgtctggttcctgccatctggacttgagccatgaggaaggccagagtgggtctgacagtccccactcctttccccgctgagccccaaggaaggggctgggcctttgcacccccaccccaacttctgcacgagttggaggcagttgatctcaatggtggaaagtggctggtgcaaagtcatgcttccatactccatgtttaggcttcatgggtgtcaaagctgggccgtgaccttgtcccattccctcagagaagggaactgaggccagagggtggagctgctctcaggccgctgcccaggcctcttgtgctctgcggttcagatggcactcccgatgccaggctcctgcccaggaagacatgcccacccgccctggccctgtctctgctgtctggtgtcaggccacctctcttcgggacccccccccaactgattgccctggggctgaccaggctctcctctccctcagtgttgggttttgggagcctctctcatcaggaggttggcacagatgccagccatgcagcggatcctgggcaggggtctcagctgggatggcctggccttgggacagggaggctggctgggcagaaccctagaaccaaaagcggtgcctgtggtgggctagggagctaggtggggagtctagtggggagtctagtggggaggtccactagacactcgttctggcacagcatgcagcgtcctccatcctggccctgctgtgggtacggagccagcagggcaggagctctcagtggagccctccaaagagggctgcttcctggaccagctgcaggatgagggagaccccttctgtccagggctgacataggctgaccaccgccagccccaccctctcactagcttcccattcagttagccattgatgagggctcactgggtgcaggatcctgggctgcccggggttgggtaggggactcctacatgtaggtaaatccgcgagatgctggagagagcaggcaataaagtggttgattctctctggaggtgacattttactttcctagtagggcttggccaggcaggcaaggtggagcctggtgtgccaggcgcagcgcttcagatgagaggaggtgagagcttggggatggcacagggaagtgttttgtctggtgagggtgtggcagggagggcaggcctgaagggacctccagggaggtgtgatcagatctgggttccagaaagatcctacctgcttggcgaccttaactgagctggagtctggaggccccacccttgcacccagctgcttccactgcttgcctcccatcccccagtgccagttccccagggcagtgccctccccatgccctcttggtgtaccctggtcccaaaggaggccaagctatgaacttttcttgcagaggtcccaggtgaggctgttgtcctggagctgtccccagagcaggcttaggatgaggggacctagccacagcttcaaccgagtggggtcccggtgtggctgccagggctccttggcaccaacccagcccagtgggttgatctctgaggacctcgtcatactcagccgggcagtctgccctggggggtggggtcaggactccccagcacttcgggatggaaggaggcgaagccagcgctgctggactagccttaaagaagcgggagacatcctagctccgcctcaagatttctcctctgcacccagcattctgctccccaaatgtcccaaatatgcagggggtcaaggaacattgctcagtggaatcaatggggagcgtgggctactccccagcctctggtttgccccatagcagccccttgggcaccgctggggacccccaggcctctgaggagcttggtttggaaagcgctggaatgctggaccaagttccctctctggctccctgagagggggtcttctagccccagtcttagggcaagaggagcccgtcccctaggagcctccaggccctggagccagacatcgggcgtcctagctacaccctttcctggctatgtgagcttgggcaagttaccaaacccctctgagcctccattcaccatctacagaatggaagagacgctaatgtcaccctggaaggtgttttgaagggtaatgtgtgtaaagggccaaacaaggccccgcacagttaaggacttaaatcctgcccggccccgggagggcttccggcatcttggggttcccctcaaaggatggcctgggcaggacttcttaaaaacaaacaggcggctgggcgcggtggctcacgcctgtaatcccagcactttgggaggccgaggcaggcggatcacgaggtcaggggatcgagaccatcctggctaacatggtgaaaccccgtctctactaaaagtataaaaaattagccgggtgtggtggcgggcgtctgtagtcccagctcctccggaggctgaggcaggagaatggcgtgaacccgggaggcggtgcttgaagggagctgagatcatgccactgcactccagcctgggctacagagcgagactccatctcaaaaaaaaaaaaaaaacaggaatgcccctgggtttcgtgctttaaaatggttgattttatgttgtgtgacttttaagttcaataaattaccaatcaaagcaacaaaacacttccagatcatttgaactttgccttaagtatcagaaggcagttagtaattcctggactttgaatgttaaatatgtggggttcttttgttttgttttgttttgtttcgagacggagtcttgctctgtcacccaggctggagtgcagtggcgcgatctcggctcactgcaacctccatctcccgggttcaagtaactctcctgcctcagcctcccgagtagctgggattacaggcccaccacacccagctaattattttgttgtttttggttttggttttggttgtgagacagagtctcacactgtcatctgggctggagtacaatggcgcgatcttggctcactgcaacctccgcctcccatgtttaagtgattctcctgcctcagcctcctgagtagctgggattacaggcgcccgccaccacacccggctacttttttgtatttttagtagagatggggtttcactatgttggccagactggtctcgaactcctgacctcgtgatccaccctcctcagcctcccaaagtgctgggattacaggcgtgagccactgcacccagccccggctaatttttgtattcttagtagagacagggtttcaccatgttggccaggctggtctcgaactcttgacctcatgattcccccaccttggcctcccaaagtgctgggattacaggtgtgagcgcctgcaccctgcccaaaaatatgtggttttgtttgttttttgaggcagagtctccctctgtcgcccaggctggagtgtaatggcacaatctcggctcactgcaacctccgcctcccaggttcaagcaattctcctgcctcaacctcccgagtagctgggactaaaggtgtgcaccaccatacccagctaacttttgtatttttagtagagatgggtttttaccatgttggccaggccgatctcgaactcctgacctcaggtgatccacctgcctcagcctcccaaaatgctgggattacaggtgtgagctactgcccctggccgaaagttaaatgtttctgttctgttcaagtaatattgagaaaaataacaggggccatcttgactctaatgttctgctccaatcaggttcccagaccagaggactgttgttaggtgattggctgtgaacaccctgaggccagtgcccctcgctgcttggcactcggagatgcctgattagcacctttaatcccttaccagtgaggcaggtggaattggccccattttacagatggggagactgaggtgaggaaggttaaagcactcagtggtgggcatgccccctggagccggccctcctttcttccagctgtgagtacccaggaagctgcaccgtgtggcctggagctgtctatctgtccttccagccacctgtctgtccagccacccttccacagactgaggcttgacaccggagcatctgtacagagcaaggagaagacaagaacatgctctaaagcccttcacagcaagacccaggaagccgcgggcaaactcagactcgaaggtaggaagctgggcggccgggtggctggacccagggcgctggctgctgtgcccacgtccagatacctcctgcggggcccacgctctctgtctgaacagcggtggacagtgaatgaagaaagtcaattcagggagcgagagggaggaataagggcagggaagggacgggcgcggtggctcacgcctgtaatcccagcattttgggaggccgaggtgagtggatcacctgaggtcaggagttcgagactggcctggccaacatggcaaaaccccatctctactaaaaatacaaaaaatttagc

SEQ ID NO: 13761 - DNA, 562 bp, Homo sapiens
accgcccagccgctcgcaggcgccgcacggagttgcgtcccggggacttggggccgcagggagctgtgagtacccaggaagctgcaccgtgtggcctggagctgtctatctgtccttccagccacctgtctgtccagccacccttccacagactgaggcttgacaccggagcatctgtacagagcaaggagaagacaagaacatgctctaaagcccttcacagcaagacccaggaagccgcgggcaaactcagactcgaaggtaggaagctgggcggccgggtggctggacccagggcgctggctgctgtgcccacgtccagatacctcctgcggggcccacgctctctgtctgaacagcggtggacagtgaatgaagaaagtcaattcagggagcgagagggaggaataagggcagggaagggacgggcgcggtggctcacgcctgtaatcccagcattttgggaggccgaggtgagtggatcacctgaggtcaggagttcgagactggcctggccaacatggcaaaaccccatctctactaaaaatacaaaaaatttagc

SEQ ID NO: 13762 - DNA, 1413 bp, Homo sapiens
atcaactttaaagatattttaaacttgatgaagacttctgaatctatcagaaaacaggttagaatgtctgtcttcaagtcttgattctgaaaagtagcccctgagcctgtttcattttggctgtgtttttattactgtgcagctgacaccccttggaaaggacctaatgcactgcacagcatttgcaacggcagatgagtatcatctgggaaatctgtctcaagatctggcctcccacggatatgttgaagtaacaagcttgcctagaggtacttcttcttgaacctggggccaaatgcagcaaatattttggtgatgggtgtggaaaattctgcaaaagaaggtgatcctggaacaatattcttcttcagggaaggagctgctgtgttttggaatgtgaaagacaaaactatgaagcatgtgatgaaagttctagaaaaacatgaaattcagccctatgaaatcgcactggtacactgggaaaatgaagaacttaactacataaaaatagagggacagtcaaaacttcacaggggggaaatcaagttaaattcagagctggatttagatgatgccattctagagaagtttgctttctccaatgctctatgcctttctgtaaaactggcaatttgggaagcatcactggataaatttattgaatctattcagtcaattcctgaggctttaaaagctgggaagaaagtgaaactatctcatgaagaagttatgcagaaaatcggtgaactctttgctctaaggcaccgtataaacttgagttcagacttcctgattactcctgatttctactgggacagagaaaacctggaaggactttacgataaaacgtgtcaattccttagcattggccgaagagttaaggtcatgaatgaaaaacttcagcactgcatggaactaacagatctaatgcggaatcacctgaatgagaagagggcactccgcttggagtggatgattgtcatcctcattaccatagaggtaatgtttgagctgggacgagtatttttctgatcaagtgataaccaaagtgtcactgcaagagatattcaagttctacaatcaaaaattaaatgttcggcccggcgcggtgcctcatgcctgtaatcccagcactttcggaggccaagaagggtggcttgagatgagatcaggagctcaagacaagcctggccaacatggtgaaaccccatctctactaaaaataccaaaattagccaggtgtgttggcacacgcccgtcatctcagctactcaggaggctgaggcaggagaatctcttgaacttgggaggcggaggttgcagtgagctaagatcacaccactgcactccagccagggcaacagtgagactcagtctcaaaaataaacaataaaataaataaataaatgttca

SEQ ID NO: 13763 - DNA, 1948 bp, Homo sapiens
aggagatgggttggctgcagtagtgagaggctgggggtgcggctctttccctgcagtcctgccgaggaagcgtgcgtccctggcgcttccttcttctcttccggcggagagcttgggatgtggtaatgccagccacactcctcagagccgtggccagatctcatcatatattatcaaaagcacatcagtgccgaagaatcggtcatctaatgttaaaaccacttaaggaatttgaaaatacaacatgcagcacactgacaatacgtcaaagcttggatttgttccttcctgataaaacagctagtggtttgaataagtctcagatcctggaaatgaaccaaaaaaagtcagataccagcatgctgtctccattaaatgctgctcgttgccaagatgaaaaggcacaccttccaaccatgaaatcctttggtactcacaggagagtgacccacaaaccaaatctgttgggttctaaatggtttataaaaatattaaagaggcatttctcatctgtatcaacggaaacatttgttccaaaacaagacttcccacaggtgaagagaccactaaaagcatccaggaccagacagccatccaggaccaaccttccagttctgtctgtgaacgaggacctaatgcactgcacagcatttgcaacggcagatgagtatcatctgggaaatctgtctcaagatctggcctcccacggatatgttgaagtaacaagcttgcctagagatgcagcaaatattttggtgatgggtgtggaaaattctgcaaaagaaggtgatcctggaacaatattcttcttcagggaaggagctgctgtgttttggaatgtgaaagacaaaactatgaagcatgtgatgaaagttctagaaaaacatgaaattcagccctatgaaatcgcactggtacactgggaaaatgaagaacttaactacataaaaatagagggacagtcaaaacttcacaggggggaaatcaagttaaattcagagctggatttagatgatgccattctagagaagtttgctttctccaatgctctatgcctttctgtaaaactggcaatttgggaagcatcactggataaatttattgaatctattcagtcaattcctgaggctttaaaagctgggaagaaagtgaaactatctcatgaagaagttatgcagaaaatcggtgaactctttgctctaaggcaccgtataaacttgagttcagacttcctgattactcctgatttctactgggacagagaaaacctggaaggactttacgataaaacgtgtcaattccttagcattggccgaagagttaaggtcatgaatgaaaaacttcagcactgcatggaactaacagatctaatgcggaatcacctgaatgagaagagggcactccgcttggagtggatgattgtcatcctcattaccatagaggtaatgtttgagctgggacgagtatttttctgatcaagtgataaccaaagtgtcactgcaagagatattcaagttctacaatcaaaaattaaatgttcggcccggcgcggtgcctcatgcctgtaatcccagcactttcggaggccaagaagggtggcttgagatgagatcaggagctcaagacaagcctggccaacatggtgaaaccccatctctactaaaaataccaaaattagccaggtgtgttggcacacgcccgtcatctcagctactcaggaggctgaggcaggagaatctcttgaacttgggaggcggaggttgcagtgagctaagatcacaccactgcactccagccagggcaacagtgagactcagtctcaaaaataaacaataaaataaataaataaatgttcactactgggtgatcatttaataggtgtttttttaatcaagaaattatctttttcagcccagtatatcgtgtgaataaaattatgaagaatcta

SEQ ID NO: 13764 - DNA, 15784 bp, Homo sapiens
gaggttagtgtattgccttttctttagcagctcgagtggtccggcttggaggtctgcgccctggctcctggccgcccggaacgtgtacagttacgggttacgccagtgcggctgtgaccctttgcctcttaccgtgatctttggtcagcttagctgggagtaaaaagcactcaattaatgaaccctttttttgagccagtgcaccgcggtaactgtagaaatcgataaaataattttgagtttgaggaattgaacggcatactcccaaagatgagcgccacttagctctcgaatcgtagcctagctgtaatcgattttcttaattggtgtaattgttctctaaaagttgaaatgtgcccgggaactgagtaactgccttgtatttcattttaaaaattcgatcgaatgcctactatgtgctgggcgctattgtcaggagatataataggaaaaaacacaaatccgtatcctcagggagcttccattctggaaggaagacacaaaaatctgccctttcctcttatttttttcctttagctttgtgtctcacgtattttactgatttacctcgttttgtctgtcactcccaatgcaaggttcaaaagattcaaaagataggatttttgtctattttattttcagctgtattgtcagcaactaggacaatacctggcacatgataagaactgagttcgtttgcagtatgaattaataaactaaaaattaaaggtgtgcaagtgatgttaaacaatggagaaatgcaaagtggaggaagataagagaatggatgctggttgtgtttttttttttttttttttttattgatcattcttgggtgtttctcgcagagggggatttggcagggtcataggacaatagtggagggaaggtcagcagataaacaagtgcacaaaggtctctggttttcctaggcagaggaccctgcggccttccgcagtgtttgtgtccctgggtacttgagattagggagtggtgatgactcttaaccagcacgctgccttcaagcatctgtttaacaaagcacatcttgcaccgcccttaatccattcaactctgagtggacacagcacatgtttcagagagcacagggttgggggtaaggtcaccgattagcaggatcccaaggcagaagaatttttcttagtatggaacaaaatgaaaagtctcccatgtctacttctttctacacagacacggcaaccatccgatttctcaatcttttccccccctttcccccctttctattacacaaaaccgccattgtcatcccgtcccgttctcaatgagctgttgagtacacctcccagacggggtggtggccgggcagaggggctcctcacatcccagtaggggcggccgggcagaggcgcccctcacctcccggacggggcggctggccgggcggggggctgacccccccacctccctcccggacggggcggctggccgggcggggggctgaccccccacctccctcccggacggggcggctggccgggcggggggctgacaccccaccttcctcccggacgggggctggcccccccacctccctcccagacggggtggctggccgggcggggggctgacccccacctccctcccggatggggtggctggcctggcgggggctgacccccacctccctcccggatggggtggctgccgggcggagggtctcctcacttctcagatggggcggccgggcagaggcgctcctcacatcccagacggggcggcggggcagaggtgctccccacatctcagacgatgggcggccgggcagagactcccctcacttcctagatgggatggcggccgggaagaggtgctcctcacttcctagatgggatggcggccgggcagagacgctcctcactttccagactgggcagccaggcagaggggctcctcacgtcccagacgatggggggccaggcagaggctgcaatctcggcactttgggaggccaaggcaggcggctgggaggtggaggttgtagcgagcctcgatcacgccactgcactccagcctgtgcaccattgagcactgagtgaaccagactccgtctgcaaacccggcacctcgggaggccgaggctggcagatcactcgcggttaggagctgcagaccagcccggccaacacagcgaaaccccgtctccaccaaaaaagtacgaaaaccagtcaggcgtggcggcatgcgcctgtaatcgcaggcactcggcaggctgaggcaggagaatcaggcagggaggttgcagtgagccgagatggcagcagtacagtccagcttcggctcggcatcagagggagaccgtggggagagggggaccgtggggagagggagaggagggagagggagagggctggttgtgtgtttttaatgtagtggttggggaaggcttcactgggtagaagacattttagcaaacatctgaaggaggtgagggtgtgagcctttcagatccctgggagaagagcgtaaggaacagcaagtgcacagatccagagaccagaatgaggagcaaaataagcaaaggagagtgctgtcaaagtggtgataaaggacagataatgtagtgccatgcaggccattctgaggggtttagcttttttttttttttttcgttacagaatctcactctgtcgcccagactttagtgcagtggcgcgatctcggctcactgcaacctccacctcccgggttcaggcgattctcctgccttggcctcccgagtaactgggattacaggcacccgccgccacgctcagctaatttttttgtatttttagtagagacgaggtttcaccatgttggccaggctggcctcgaacatctgaccttgtgaatcacccgcctcggcctcccaaaatgctggggttacaggcgtgagccaccgcgccaggctttttttttttttttttttttttttttgagacagagtctcgctttgttgctcattctggagtgcagtggcgcaatctccgcctcccagattcaagccattctcgtgcctcagcctcccaagtaactgggattataggcccatgccaccatgcccggctgatttttgtatttttagtagacacggggtttcgccgtgttggccaggctggtctggaactcctgaccccaagtgatccctcccaaagtgctgagattacaggcgtgagccgccatgcctggttggagggctttggcttttattaagtgaaccgtgaagccacagctagatttcgcgttgagattcaacttcaaaggatcactttggttgctgtgttgagaagaaactgtagggggcccaaaacagaatcaggaaaactggttaagaagctattataataatccatgggaaggatagcagtttggatcaggtagtattattactgatgatgagcagtggtccctagaaggcccttgggatttactgagaagttggatatggagaataaagagtcaagctggaccccacgtttttggcttagcagttataaagatacttattactgctcatgaatgggaaagactgggaagaaagggatgcaagggattctaggggtataagggagaggttagaatggtagaccatggagtgtaaactggatatggaggaagtgaagtcatggggagtgagagacagtgaaaaggtggttggatcattgacttgtgggtcctgttggggttgaagaattattggaattgggtaatagaaggagtgagatgcaaagataggaggtggtgcttagagagtaaaatggatgaaactgagatgaggaggtccgatgtattgataatgacaatagggccctgtctgatagaaaaacagtgtaaggcacaaatgtaatcttaggctttctagaaggtgcagtgataaaaatgggctgggtccggtggctcacgcctgtaatcccaacactttaggaggccaaggcaggtggatcacctgaggtcaggatttcaagaccagcctggccaacataatgaaaccccgtctctactaaaaatacaaaaaaattaactaggcatggtggcagacacctgtaatcccagctactcgggaggctgaggcaggagaatcgcttgaaccggggaggcggaggttgcagtgagctgaggtggcaccactgcactccagcctgagtgacagagcgagactcccatctcaaaaaaaaaaaaaaaaaaaagaatttactcaaagagaataaaaagaatccaggactgtagacaaacttctaaaatattttatagtttcttcaaaattaagtggttcaactggcatggcatagtactaattaaaggtgaactacagtagccaattggactagaatgaagcacagaatgcgagcttttgaagggattttggaagcagcaggttctacctcctaaatatcactgtgaatcatctttgtccttatcctgaagagaggtagtaaatacaaggtagtgggtaagagtgttgactttggaattgggaaagcctgggttttattttagttacatctctgcagcttcttaacggtgagcacttagcctctttaaacctcagtttcctaatcagtgaaatgggatcattatgaggtgaagccgagcacttagcatgtagaaagcgctcagagtgatgtcagagtctgtcttgtttcctcctacatatcatcaccaaaaatttgtttcatgaacatgcatttgaccgtgtgactctgagttaaaagctcagctttctccccacctgtagaaactttttaggatgactttatatatcctttggtgatctggccatcggctcttttggtccttacctcctgcagctcactcctacctccccgagatggggagatgaataggactccatgcctggggtgtttaacttgctgatccttctgccctttcaagactcagttcaaatgtcacctctgtgacaatgccacactcttcacatgctcctttctctggactagagcaatttgtgcatctcgttcattttcctctgctagactttgaattctgagatcattgattcatctatctctagcacctaacatattatttttaaaaaaagaattattgattactacggtctaacttttttttttttttgagacagagtctcattctgtcgcccaggctggagtgcagtggggcaatcctggctcactgcaacctctccctccctggtttgaacgattctatatctcagccacctgagtagctgggattaaagccactatgcttggctaatttttttttgtatttttagtagagatggggttttgccatgttggccaggctggttttgaactcctggcctcaagtgatccccccagcctttagcctcccagagtgctgggattacaggcgtgagccaccatgtgtggcctactataggctaactttaaaataacacatttcatactgtaaataagggggaaattctgtttaccttgtctggaatgttcatgtgtgtatctgacatgcctcgcactcccatgcccagccccaagctgaaaagcaccttcgccttctagaatcagcttagatctttctgggaacctttcctgattttttttttttttttcctgagacagaaaaagggctggaatgcagtggtacaatcatgactcactgcagcctcagtcttctgggctcaagtgatcctcccacctcagcctgtgagtagctgggactacaggcatgagctgccatcacacccagctaatttttaaatttttgtcatttttgtagagatgaggtttcaccatgttgcctcagctggtctggaactcttggactcaagcgatccacctgcctcagcctcccagtgtgctgggattacaagtgtgagctacagtgcctggccagcacagatttttatatacttgatatgctaatgaagtaaatgaagtggtcccatcactattttttttaaggttcttgttatgtcagtagctttataatcttgtaatcttccaggaagaaggccaaatgttgctaaaggcaaagtggcagaaacactgtacttatatttttaaccttgttcttttactagaattaacttagaatgtatctgttttacaaatttttctaacagaaatatgcctgctacctagggaaatattatatatgttttaaacattaatttaaaaacttgaactttgaattccttttcttttagcttgggatgtggtaatgccagccacactcctcagagccgtggccagatctcatcatatattatcaaaagcacatcagtgccgaagaatcggtcatctaatgttaaaaccacttaaggaatttgaaaatacaacatgcagcacactgacaatacgtcaaagcttggatttgttccttcctgataaaacagctagtggtttgaataagtctcagatcctggaaatgaaccaaaaaaagtcagataccagcatgctgtctccattaaatgctgctcgttgccaagatgaaaaggcacaccttccaaccatgaaatcctttggtactcacaggagagtgacccacaaaccaaatctgttgggttctaaatggtttataaaaatattaaagaggcatttctcatctgtatcaacggaaacatttgttccaaaacaagacttcccacaggtgaagagaccactaaaagcatccaggaccagacagccatccaggaccaaccttccagttctgtctgtgaacgaggtaaagtaggggtggccgtggctctcgtgcttagtgatcattgctcatgctaaaccagtgtgcgttgcaccccagccttaccgccaacgtaagagaactagcagtcactcagacttcttcatcaaggtctttgaagcctaataaatatccaaagggattcagaatcttaatttttaacaattaatgatacatataaaaacaaaatacaggtgataacacatgaaaatagagtttataaaagatttggttattggtctaaggaaactgaaaaagaggaccaatattaagtccagtctaagaatgggactgtaaaaaaaaataaaataaaaaaaaacaaactagaaattcttcatcaagttaaaaaaaattgtaactctgcagacagataagcctttattaggctgtggcagttgcatggggcggtgaaatgacacggtagggtggactccaaaagcagcaggagaggagggcccagcttttttatcctcttaaggtttaagggggtattttttattcatccttaaggggtttctgggaatttttctgctacaatttgcatttctccttcagtaacaacttaagggtcaagatcaagcccttgataacctttgtatcttgcataatacctagaactgtaccttgtacttaaatgtttataagaggatctttaatgccgatagtcatcaactttaaagatattttaaacttgatgaagacttctgaatctatcagaaaacaggttagaatgtctgtcttcaagtcttgattctgaaaagtagcccctgagcctgtttcattttggctgtgtttttattactgtgcagctgacaccccttggaaaggtatacatacatacctttactcatcctctgattctgaatctagcaatgaatgaatggtttttgtgttggattctggaatgctttcaattcttgtgtggttactctgaactcaggacgtgaaggatgaagtgttgtgcagctactgtttcccctttccttttgctggagctttggggtaacctgggaaattcagtatttaagtgtccgagatggcattaagtgtaaaaacctgaattcatggcagctccaaaaaagagaaagctcaactcactttgttcatttgtaacgtctagcagcacagtgcatcaggtttcttaggaagaagctgataggtcagagatgtccctaggctatttctttgggccatccttagacttggaagcaattttcctaaataccgtatctatttttctttagatttttttttctacttccttccaggaaagaatttgaagtagattttcaacattcaacatagtttcaaatgagataataaatactttcacatattagagcaaatagttgacatgaacagagaaatgttatgaagtacctgaaatgaataatctagttgaacattttgttttgagaagcgcagtaattaaaagaggaactcctcctgggatttagtgtttgttgtttattgttgtgggagagggcagagtaaaaacataaaaatatcttcagagaaataactttttccagcactgaaattaaggagttagttatttcatggattctgttataggagacattatgtaacatgatagacaatgacttcagttggagtttggcaagagcaagtcgcatgctgtctttctgaaagcacagggaaataatagaaaatcagatgtttctggctgggcggtggctcacagctgtaatcccaacactttgggaggcccaggcaggcgattacttgaggtcaggagttcgagaccagcctagccaatatggtgaaaccctgtctctacaaatatacaaaaattagccaggcgtagtggtgcacacctgtaatcccagcggctcgggaggctgaggcaggagaatctcttgaactcgggaggtggaggttgcagtgagctgagatcatgccactgcactccagcctgggtgacagagtgagactctgtctcaaaaaaagagaagaaaatcatgtttctaaagtggtctgagataatgtaattttggaacatcattttttgaagattttacttttcatagagaaagcagtcttggcatgactaggtaatatgtccccaggaccaaagactgactttcctctgcccgaaattgagggccactccatttttatacggccatcatagtggtaaaccctttataccactttataccatcaaaatggtaaaccctttataccattcttgactgagacaaggaaaagactctgctttgtgtcagaaagcatgtggactttattttgttcccatagttgcacccagctcatcttttcagctctgcagaacagcgtgcatctggagttggctgaatgaggtttcagtcaccctgtctgttggaattaaatctttacctggtctcattttcagagatcataatctgagatactcaacccacatccctttggcttacaattcctaaaagcaatagtggatccagtggcttatgcctataatttcagtgctttgggaggctgacacagaaagaccacttgaggccaggagttgaagaccagcctggcaacatagcaagactcccatttctaaaagacttggaaaaaaaaaaaaaaaaaagccgggcttgctggtgcgcagctgtagtcctagctactcaagaggctgaggtgggaggatcgcttgagctccagggttccaggctgcagtgagtcgtgactgcacctcgctccgtccagcctgggcgacagagtgaggccctgtcactaaacaaacaagaaaacaataatagcagtgcttcttgttaatgtccagtctttgaagagaacagcagaggatgggaacggcaggtctgagtggcatggagcccgacaccagggagaatgttttcaggctaatagcactgtgttacagaatcactggtggactgttaaccatttttttgaaaaatgaaatagaatagaaaataacagaatacattgctcatgataaacgtaaatactggtttgtgaagcttttgtggcaattggtgtgtaagcatatatgtgtatatgtactatgtttaatgatttataggttgtagtcagaaaaacttacaggataaagcgtgatcttggtaacgtaaaatgtatctgtgtttttatagctttaatctccaatcagtatgttacaggagaaaaggcatttttccttagtatgatctatctactcacagtacttctgacatcaaatatatggggacctcttcctcctcctaccagccagttctccaattctccagacactaacaaggtgtcctgcaattcagttcaattccagcactagccagagttagtgcagacgccagttagttaagctcagccccacaagactgccctcccagttgacacctgtgcttctgaccaaccagctctatgacaaccatcccctcttcaggtttgattatttgctagaatggcccacagaactcagggaatcattttatttatgtttactgggttttttatataaagtatgcaaatgaacaaccagatgtagaggtgcacagagtgaagtcaagaagggcctggaacttaggagcttctgttcctcatagaactgggctgtgccaccctcctggcacatggatgcattgatcaacccaggagttctccagaccccatcatctgggtgtttttaatggaggtttcattgtgtaagccatgattaatgattaactcaatctccagcccctctccgtccaccagaagttaagggtgaggctgaaagttctaagcttctaatcaaagtttggtctttctggtaaccaccccccatcctgaagctgtccaggacccactgagagtcacctcattaaaacaaaagatgttcccatcactcgtgaaattccaagggatttttagaagctctgtgttagtaactgaaggcaaagagcaaatactacaaccaaaaatgcccctgtcacttagaaaattacaggggtttttaggagtctgtactgggaaccaaggacaaagaccaaatgtaaatgtattatatcactatagaagcaacattgctgtaacacactaattttcttcagtaatacagtgtaaatgaaagtataatttttaaaaaaatgttctgatcagagcatgcgatgctcctaaaacaagaatcatatgtagatttctagccccatctgctggaacatgtcttctttggccagaaaaacaaaacatactaaaatacagtggtttggggtttttgctttttgggttttttaaaacattttgaagtagaaaagccctgaatatcataactattatcggttggtttgacacatctatttaacaggaaggtgtagatccccatcctgaaacccaaaatatgctttacatatatatgtagctaatgcttaataaggattcactgtaaaaatccagaaaaggatgtataaaaatgaaagctgctcagaaaacaacagcatctttaataaagaaaaaaaagcagacaagacattccatgattctctttccttttaccaaataggctaaaataaaaaaagcaaagaaaacaaaaccaaaacaaagtgtctaaaacgtcaagttcatctattaatagaagaaacccacaactaagactcagagctaagaagtttaaggagaatacagaaagtagtgtagcaaaccatataagctgagtgacattggatagaactttgagccaaactaaatgggagatcccaagagaaggaaaggggacagttgacagtctggaaaacctacaacaaagatccttaggatggccaagtgaaaacagattgtgtttaaagatttattcataatttatttggagcttagaatatattttctcataaaaatagtgattgacttgtcctgtccttgagagttgaaaatagtacacattctcaatttgccgttagtgtcggaatattcacataatttgggataccagattgcccaaaactcagttctgaatatattgagccttttatttttatctccaagtggcggtttttaaaactgaccttttaccttgatttaaaataatagtgcctggctgggcatggtggctcacgcctgtaatcccagcacttgaggccgaggtgggcagattaccagaggtcaggagtttgagaccagcctggccaacatgaagaaacaccgtctctactaaaaatacaaaaattagccaggtgtggtggtgcatgcctgtaatcctagctactcgggaggttgaggcgggataatcacttgaatccagggggtagaggttgcagtgagctgagatcgcaccactgccctcacgcctgggcgacagaggaagactccgtctcaaaaaataataaataggccgggtgcggtcactgatgcctgtaatcccagcactgtgggaggccgaggcgggaggatcagatgaggtcgggagtttgaggccagcctgaccaacatggagaaaccccgtctctactaaaaatacaaaaattagctgggcgtggtggcgcatgcctgtgatcccagcaactcgagaggctgcggcaggagaatcgcttgaaccggggaggcagaggttgtgatgagccaagattgcaccattgcactccagcctgggcaacaagagtgaaactgtctcaaaaatataataataataaagtaaaaaacagaataaaataataatgcctgccaccgccattaacagaccttgtactctaatgccaagctgtatatgggacagttgccagcatgtcttcactggcactataaaatatagccaagaagataggctctgagagtaagaagtctgtgttggttaggagtaattttgtcctggctctctggtataaagctctcaaatgtaaatccgggtgggataatggactcagctctgtctgcaacatgccactgtgcagagaagcactctcatgcataagctttttatgctgtaaactatagtagctgaaattaaatgccactttttcagaggtgaattaatggagagcctggtgaaattcaaagctttttgatgtataaaacttgataaatggaactattccatcaataggcgaagtataacaacctgtctacatagatagtatgtaatttctgcacaggtctctgtttagttaatacatcactgtatatcaatctagaatcttgctccaataaaggaacataaagttgtgttttggttttgtttttgtttgaaacggagtcttgctgtgtcgcccagagtgcagtggtgcaattttggctcactgcaacctcggcctcctggattcaagggattctcctgccttggcctcccaagtagctgggattacaggtgtgtgccaccacgcctggctaatttttgtatttttaatagagccagggtttcaccacgttgaccaggctcgtctcgaactcctgacctcaagtgatccatccgcctcagcctcccaaagttctgggattacagacgtgagtcattgggccttgccaaggtttttgggttttttttggaaaaaaaaaaaaaagtagtacacattcttagtgcagatgggcttggccagtaccacatgatggtgaagcagacgtgagacaacagggagaggcagggacagtgtgggctggagaccctgggcccccctactctatcctagtccattattatagccagatcttccactcggtcagatgatgatggaaatctggattttgtgtgaaatctctcagtttattgttgacaagtcaatttgaattttagaaacgtgatgtaggtcaactcttgagttggatggttctccgagctgccagtttacaactccgattctagcaaaagagacagcctctgccattttcagtacagctacaggaagatccttcagtggactagcttgtgacctgcttatctcctttttgtgcctcttgctcttcccacttcagcccaaactaagcacatgagctgtagccatcacagaagtaattctgacatccaacctaatgtactgtgatttcacctagcaagcttgagtgaatttgccaggtcttgcagagtggagcctacccgatgtctcgcctgatgccccttgctaggattcctttctttcagctggccgaatctttacacacatcgtacatcagctagttttaactccatgaagccttaaaaagaactagtgctcacaggtctaaaccttaagcacgtgcctgttccctgtactctggtaactcctgatacatttttatttgtatatccccgtgttcctactttcatatgtgactatgggaattagctaatttggaaggaattagcagttatctgctcataattagggtactacatccatttatccccacattccccagtaatttcagcttgtctgactttttttctaattggattagtctcattttgtttatgagtagatactttattgattttggatttttcagtttgcatggatcctcaggttctctgttattcctctacctttaaaccacgcatcagagctgtggaacagattgaggaagggcaaatggggtcaggccatttcatgagaaagagccaggagatacagaatggaggtgggaggaaggaatgaattaatatatacttctctagaatttcataccaggaatatacagaatgggaaagaattggggagctgagaggagtaaatcctaagaataaatgttgatttagtgactcataaacttgttttggccaactagaatctaacaactactgaacagttgtgttagccacagtcctgagcactttgtttattagcttatttaaactttacaacaaccccataaagtaggcattattgttattctgatactcttttaaaattgtaaccaacttctgtgcctaaaatcttaactcttatgccaatagctttcaaactttattgaccacatcttatagtgagaaatatatttaacattttacatacatagcgacctagagtagatacatagatacatgtaagtgacagaaaacttcataaaatagcatttcctgtgaataatgcactgtaatattttctatttagttttattaaaaaagctgttttgggccaactaaattggtatcagaactcactaatgtgttgtgacttacagtttgaaaaaacacagcattgagccatagtgcttaccatctgtattttatatagacacaagatgactttcctcatgtgtgcaaaggcaagatggggcatgagacaaagtacaaaccaaaccaagacacatgctcagatttacagacctttttgttaaatgttaaccagtgtaaaaatactgtaattcctttggggatttaaaggaatctgcctgtacaagagtagttacaaattaggaaatgacctcaaatactaatgttgctttgaaaaagagtcatggaaactcagggttggagagacttaaacattccatccagtcacccatgtgatgccttaatcatctctattttgcattcaatctgtgcttgagatactaccagttgagtgtggcttccctttcagaataatccattccatctttttgcctggcgggagggagcaagttcttttcaagattgagctgaaatttgcctcccagtaacttcattctcttcatcttcatcccatcccttgtatcacccttggagatgtttgaagaaaattctggagttctagctttgcagaatggagtccagtagggtgctcagcagccgtcacagatgcttcagcctcttggtaacccatgttatgctcatttccctggaacaggacctaatgcactgcacagcatttgcaacggcagatgagtatcatctgggaaatctgtctcaagatctggcctcccacggatatgttgaagtaacaagcttgcctagaggtacttcttcttgaacctggggccaagtatgttaaaatgtattggataattttcctatgatactatcttaagtatgtatttgtttgcaattcattttcttttgaaaggattgtatcataaaagtggatgttgaatctctttataaagatgacaaagttaagaattaaaatgtatttacagagaactcattaaaatcagtatgatttattaa

SEQ ID NO: 13765 - DNA, 841 bp, Homo sapiens
gagcttgggatgtggtaatgccagccacactcctcagagccgtggccagatctcatcatatattatcaaaagcacatcagtgccgaagaatcggtcatctaatgttaaaaccacttaaggaatttgaaaatacaacatgcagcacactgacaatacgtcaaagcttggatttgttccttcctgataaaacagctagtggtttgaataagtctcagatcctggaaatgaaccaaaaaaagtcagataccagcatgctgtctccattaaatgctgctcgttgccaagatgaaaaggcacaccttccaaccatgaaatcctttggtactcacaggagagtgacccacaaaccaaatctgttgggttctaaatggtttataaaaatattaaagaggcatttctcatctgtatcaacggaaacatttgttccaaaacaagacttcccacaggtgaagagaccactaaaagcatccaggaccagacagccatccaggaccaaccttccagttctgtctgtgaacgaggacctaatgcactgcacagcatttgcaacggcagatgagtatcatctgggaaatctgtctcaagatctggcctcccacggatatgttgaagtaacaagcttgcctagaggtacttcttcttgaacctggggccaagtatgttaaaatgtattggataattttcctatgatactatcttaagtatgtatttgtttgcaattcattttcttttgaaaggattgtatcataaaagtggatgttgaatctctttataaagatgacaaagttaagaattaaaatgtatttacagagaactcattaaaatcagtatgatttattaa

SEQ ID NO: 13766 - DNA, 1340 bp, Homo sapiens
gcagtagcgggggtgggcgggagcgcccttccaggagatgggttggctgcagtagtgagaggctgggggtgcggctctttccctgcagtcctgccgaggaagcgtgcgtccctggcgcttccttcttctcttccggcggagaggacctaatgcactgcacagcatttgcaacggcagatgagtatcatctgggaaatctgtctcaagatctggcctcccacggatatgttgaagtaacaagcttgcctagagatgcagcaaatattttggtgatgggtgtggaaaattctgcaaaagaaggtgatcctggaacaatattcttcttcagggaaggagctgctgtgttttggaatgtgaaagacaaaactatgaagcatgtgatgaaagttctagaaaaacatgaaattcagccctatgaaatcgcactggtacactgggaaaatgaagaacttaactacataaaaatagagggacagtcaaaacttcacaggggggaaatcaagttaaattcagagctggatttagatgatgccattctagagaagtttgctttctccaatgctctatgcctttctgtaaaactggcaatttgggaagcatcactggataaatttattgaatctattcagtcaattcctgaggctttaaaagctgggaagaaagtgaaactatctcatgaagaagttatgcagaaaatcggtgaactctttgctctaaggcaccgtataaacttgagttcagacttcctgattactcctgatttctactgggacagagaaaacctggaaggactttacgataaaacgtgtcaattccttagcattggccgaagagttaaggtcatgaatgaaaaacttcagcactgcatggaactaacagatctaatgcggaatcacctgaatgagaagagggcactccgcttggagtggatgattgtcatcctcattaccatagaggtaatgtttgagctgggacgagtatttttctgatcaagtgataaccaaagtgtcactgcaagagatattcaagttctacaatcaaaaattaaatgttcggcccggcgcggtgcctcatgcctgtaatcccagcactttcggaggccaagaagggtggcttgagatgagatcaggagctcaagacaagcctggccaacatggtgaaaccccatctctactaaaaataccaaaattagccaggtgtgttggcacacgcccgtcatctcagctactcaggaggctgaggcaggagaatctcttgaacttgggaggcggaggttgcagtgagctaagatcacaccactgcactccagccagggcaacagtgagactcagtctcaaaaa

SEQ ID NO: 13767 - DNA, 13301 bp, Homo sapiens
ccagttgagtgtggcttccctttcagaataatccattccatctttttgcctggcgggagggagcaagttcttttcaagattgagctgaaatttgcctcccagtaacttcattctcttcatcttcatcccatcccttgtatcacccttggagatgtttgaagaaaattctggagttctagctttgcagaatggagtccagtagggtgctcagcagccgtcacagatgcttcagcctcttggtaacccatgttatgctcatttccctggaacaggacctaatgcactgcacagcatttgcaacggcagatgagtatcatctgggaaatctgtctcaagatctggcctcccacggatatgttgaagtaacaagcttgcctagaggtacttcttcttgaacctggggccaagtatgttaaaatgtattggataattttcctatgatactatcttaagtatgtatttgtttgcaattcattttcttttgaaaggattgtatcataaaagtggatgttgaatctctttataaagatgacaaagttaagaattaaaatgtatttacagagaactcattaaaatcagtatgatttattaagattatttataggatcattattacttgaggtggtcagaggtcatactacttcatttctagcacattaagaagttattttagtttgtgtgtgtctgtgtgtgttttgtgttttttttttttttgttttttgggatggagtttcactcttgttgcccaggctggagtgcaatggcgcgatctcagctcactacaacttccgcctcccaggttcaagcgattttcctgcctcagcctccggagtagctaggattacaggcatgcgccaccacacctggctaatttttgtatttttagtagagatggtgtttctccatgttggtcaggctggcctcgaactcccaacctcatctaatcctcccgcctcggcctcccaaagtgctgggattacaggtttgagccaccacacccagcccgttattttagtcttatagaagaaccatgaagttgatagacatggggagagcctttaaaaaaaaaatttaccagctcaatctaatactttaaaacaattagttagccgggtgcagtagctcacgcctgtaattgcagcactttgggaggccgaggcgggcagatcacctgaggttgggagtttgagaccaacctgaccaacatagagaaacccctgtctctactaaaaatacaaataataataataataaaacgattagttagaagataaaaatgaaaaagaagaaaattaaaatgaacttaattgaggatttttatggtgaaatcaggaaggattcttgagaaatggcttgctttacattaattaaaaataatttaggccagccatggtggctcaggcctgtaatcccagcactttgggaggctgaggtgggtggatcatttgaggtcaggagttcgagaccagcctggccaacatggtgaaaccccatctctactaaaaatacaaaaattagccaggtatggtggcacgagcctgtagtcccagctacttgggagactgagacacaagaattgcttgaacctggagggtggaggttgcagtgagctgagatcatgccactgcactccaacctgggcgacagagtgagactctgtcttaaaaaataaataaataggccgggcgtgatgcctcatacctgtaatcctgcactctgggagactgagacaggcagatcacctgaggtcaggagtttcagaccagcctgtccaacatggtgaaaccccacctttactaaaaatacaaaaattagctgggcgtggtggtacgtgcctgtaatcccagctactcaggaggctgaggcaggacaatcacttgaacctgggaggtggaggttgcaatgagccaagatcgtgccactgcactccagcctgggtgacagagcgagactctgtctcaaaaataaataagttacttagaacattttgataaacttttacagtgaaactcaggatagctcaatacccagaacatttattaatttacctaagagtagcaaaaataggttgaaagccttcctataacagtggaaattcttaagactcaatcccatagaagatagttgaaatatcattgtgataatccaaacagaccgtttgtgtgattaggtgacaaaaacaagcatagttgacttagaaagacagagctatgtctagagccccttggtatgaaaatttgcctggaggtattgttggctgatgctgaaggctgccagctgtgtggtctgtgcttcacagaattgcaggcttcactgccctgggttgtttcagtcgattttattttgcttttggctgtgtaggcaaactctgtcctatgtaggatgtagtaattaacaatttagaaaaaaaaaaaaaatcacagttttggtctgtgtctgaattgcccatcacccagcctttaccagaaatttctgaagctttgaggatcctaattttatgttaattccgttaagacatacaaccttttgcaaattaatagtatattttttaattgatatattaacattggttgtaatttatattatggaatatatgcttatgataaatatcactatactaatatataaagcaacttcttatgatgaatattggtatattagtatatgttttaacaatacttaggccaggccccgtggctcatgcttgtaatgcactttgggaggccaaggcaggcagatggcttgagctgaggagttcacgaccagcctgggcaacatagtgagacctcatctctacaaaacataaacaaaaacttagccaggtgcggtggcacatgcctgtagtctaagctacttgggaggctgaggtgggtggggcgggggggggtcccttgagttcaggaggttgaggctgcattgagctgagatcatggcactgcgcttcagcctgggagacagagcaagaccctgtctcaaaaaaaacaaacaaacaaaaaaaaaactttttttttaaatagttgcaggtggctgcagtggtagcccctgtagtgattaaccttgaaatcacatatgttttgaagtggtcagtatctttatttctgtgtattttctattgccctactttttatactttaaaattcagcaggagtagtagtttgggaatgttaaaattgcattattaatgaaatggtatttataggaagagaatatattaatacttcttcaaattttatttttaattttgtagaaagaagtttaattcttgacacttagttgtatggaacctaagactttattaattatctggactagtgattattgaatcaaaatgggcatgaatgagctctaatattaatatcacaggttgttgaatgttttataaaagtaattgctgatctttttttggtggtcgtatttgcatttttatatattaaatcctttcagaggccttagtagaaagatggtgattgtgttacagagcactccatggtatataaagaaatgatcttaagtactttattacagtgtttataggtgactcttacaacttgtgttaccttgacatagcttttttgttcgtttattttaaatcacagatgcagcaaatattttggtgatgggtgtggaaaattctgcaaaagaaggtgatcctggaacaatattcttcttcaggtaagacaggaaagaaaccccattaggtgatgatgggtttgggtcaagtaattgtggtctttaaaggtgcaggcatacctttcttaacagtaaatgtgttcaaaatgtatttgtgatttaaatttatcatttaattcttatttaatctaggagagtttgtcacttttaggaattctctggtaaaccctcttataaagtaaagaatatttcaaacaagtgaatgatcttccccggggtgtctttctttgtaaattcggattttcatggactaaatttctggaaagcagccaatttcccattcatctttagtgccccttgtcagactcctgccccagggaaactcccgctacctccctgctgtctcttcttgccattttcttttttttctcccttcccctttggtagctctttaaagttttagcttacctctccagaggttttagactaggagactcacatacacacttattccttttatctaaaggccgactcaatactaaatactccacagtagctgcctgggaatgataacatgatagaaccgtgtgaaataatctcatttatcctcagcacaccgatgaaggtctattttgcacctgaggaaactgagggtcatagggattgagttacccatagtcatgagactaatacgtgacagaacagaaacacatggaccatctgtaggaatccaaagttgagtaaagttcttgtggtcataatccttatagttgatgataagtggaagttcttttttcctttcaatgcctaccttccttttgaccccatctttagagagaatcaagattccaacatttaattcaagtagagtaatagcatccctgttgttccgagtgaggaatttagatttgtgagggactctacatcagcactgtctagcagaaatacagtgcaagcctcggctgggcacggtggcttatgcctgtaatcccagcactttgggaggctgaggcaggcagatcacaaggtcaggagtttgagaccagcctggccaacatggtgaaaccctgtctctactaaaaatacaaaaaattagccaggcacatggtggagggtgcctgtaatcccagctactcaggaggctgaggcaggagattcacttgaatgcgggaggcgatggttgtggtcagctgagatcgtgccattgcactccagcctagtgacagagtgagactctgcctcaaagaaaaaaaaaaaaagaaagaaagaaatataatgcaagcctcatatgtaatgatacattttccagtaaccacattttaaatatttttaaaaagataaaattaattttgaacaacacaaatatgtttcttaacatattaacatgaaattaatttaacaatgtattttattcaacccagcatatctaaaatattatcatttcaacatgtaattaataatgatattttttcacttgtcatactaagtctttgaattttgctgtgtattgtacacttacagcgcatctcagtttgcaccaggcatgtttcaagcactcaatagccacatgtggcctctgagtaccacattgcacagcacagtgcattcctctggttggaggaatatgcagttcaccagacctctcttctgcctggaagggattctctgaactgatactgtggctgtggcttgaaatacctctcaaatccgtatcctgaaaccttatccctgcctattgtaacagcttattgtctccctgcctgcctgctcacccaccaccagtctgtttgtctattgtaagcagggtcattcttcagtggccatttctgaccactacactctcctgcctaaatttccacggactatgaacaaattctctatcactgcataaagttcccttctggattgtcccctgcttgcctctttatcctgcttgcccactgcttgaccacatctgcagccacgcagctactggctgtttattctgagatgctgctctgctccgtcccacctcctctctgagcctgtgtgtcccctctgctatgttgtctcctcttgttttctcatttggctgcctctgctagtcctttagcaaaggggtccctctggtgtacatctcatggtatactctgcatactcttgtagcactgatcacacactattgtaattggtggtctaagtgtcagtcccagtcttttctagattgaggataggaatgaaatcatacttatgtttctatcacaaatactaagcatggacccacacatatactaagtactttagaaatgtttcaagaataacgtggagccattaatatttttacctttcttttatttcctcctttccttcctccagtgcactgaccctgagctatagctcctgtttttatttactacctgaaacagcttcaacacgtcaaacttgagaaatcaaaacaaatgcattcgtagttttagaccctaaataatgttaaagccataatcggattcagagggcctcctgtggtgtcactgtagttctgttccaagcactgtgagcgtggggagcattattccatagaggcctttaaccatctgatgcttaaattaaccaccatctctttattccacaaaaatccaggcatagccctttattccttgcacatagtagagtctgcctaatgagagctaagacaaggtctcaaaaaatttccttattctgatttctgtggatcagaattgaaccaggtatgaaagagtctacatacgtgaagttatatagtattacaataatggctatttgtttggcaaaccatgtgagaaatcataaattttgaggaggtcaggttttatcaagaattttattttagctcttattgtaggaagttcacctaaggaccataatatcaaattagtaagtaccatcatattttgaaaaatcgcatcctgtatacattctagaagttacatggttttatatacgaccctaaagaatgtattccatctgtatcttagttgtttcttttatttttttaaatcagggaaggagctgctgtgttttggaatgtgaaagacaaaactgtaagtgtaaataaaaatgtgaaaatataaaaatttagttttgtgagaatgaattgttaattagcacatactgaaacattagaagggaaattaatagattatgcacaacttatttgctctgcattacatgatacttatcagtttcatcttccaaaatatattgtattttgggttaagatttcctgctttttcctttctctagacacacactaatttgtggagaatcagaaccatcctaactatactgcagacagaagtactgtagactttgcatgttgtactatacaaaatgtatgcagttaattggaagctggttgcattgagtgttcttttaagtcaagttgtctagaacttactactcatgggaaataattttttcaagatccaaatcaagatttgtttaatacaaccattttagaggcaaattggtaatctacattaaagctttatatttaacccagtaattttacacctagaaatttatccaaaggaaataatcataactattcgtgatgatttttgtacaaaaatgttcatcagagcaatatttataatggcaaaaattagaaattaccaaaatacacaataatagtttgttaaatcatccatatactacagatatactatagatccccttagaaatcatgtaaaaaaatatctatttctgggagattgcctatatatataatacagttacattaaaagagcagattatacggccaggcatggtggctcacgcctgtaatcccagcactttgggagaccaaggccggcaggtatcttgaggccaggagttcgagaccagcctggccaacatggtgaaccccatgtctactaaaaatacaaaaattagctgggcgtggtggtgcacacctgtaatcccagctactcgggtagctgaggcacaagaatcgcttaaaccttggaggcagaggttgcagtgagccaaggtcagaccattgcactccagcctgggagacagaggcatactcttgtcttcaaaaaaaaaaaaaagcgggttacaaaatataaccaatataatctcagaactggttaaaaaacatgctttatacaatcccaattttacgaaaaggaaacacacacagtaggtggtcgggaagggaacttagagaaaagaaaatataaatgaccaataaatttaagaaaatacaagttggctatttgaagttgcaaagatgtaaaaggctgataaaccccatttcttaagagtagtttcataaatgttgagattctacatttggaaaaactactttggagagcaggctagcaatattataagtgtgggccaggtgtggtaactcatacctgtaatcgtatcactttgggagtctggggtgggaggatcacttaagctcaggagttccagaccagcctgaacaacacagtgagatcccatctctacaaaaagtttttagaagttagccaggtgtggtagtgtgtacctgtagtcccagctacttgggaggctaaggcagggggatcgctcgaacccaggagtttgaggctgcaatgagctatgattgcatcactgcactccagcctgggtgacaaggtgagaccctgtctgttacatatatacatattgtgtaagtccacatatcttttgatctagcaattcctaaagaagtattcccacaaagccatgaagacctttgcacaagtgtggcacatcgcaacattgtaatggagagtagaaaaaattccccatggaggacacacctaggttggttaaataaattgcagttcgtctgtaaaggaaaatagtgttgaaaatgtcatgtgcataatatgatcctattttacataaaaagcagcataaatatgtacatatatacacataaaaagtctggaaggatatgcaccaagtttaatcatggttgcctctggggattaggatttcagtacagaagagagaaagagatgatcacctcccacacctgtgtggcttaattttttattagtatgttgggctttactttttattttttatttatttatttttttgagatagggtcttgctctgtcacaccggctgacattggctcactgcaaccgccacctcccaggctcaagccagcctctcaggtagctgggactacaggtgtacatcaccacacccagataatttttgtatttttttgtagagacaggattttgccacgttgcccaggctggtcttgaacttttgagctcaaggatccacccgcctctgcctcccaaaatgctgggattattaaagagatttaaagaatacaaattataatattactagtgattttccttgggttgtgggataatgataaccttgattttcttctccattctcatctgtgttttccaaatgtaaaaacaaatgaacatgtcatcctgattactttaatatcacaatggatttgatttgccttttccttaaaaacatgcaacagaaataatgcctgtaagtgtaatgaagactgttataagcattaaaatcataacatacttgaactgagggagtcagttatgatttcagattaatcttccttttcttctagatgaagcatgtgatgaaagttctagaaaaacatgaaattcagccctatgaaatcgcactggtacactgggaaaatgaagaacttaactacataaaaatagagtaagcaacttttcatcaaatttatgaaaggggcacttggaataaattaggtaaagcaatagaggagacaaattattatgcatatggaaactttttttttttttttgagacggagtctcactctgtcgcccaggatggagtgcagtggcacaatctcggctcactgcaacctctgcctcccgggttcaagcaattctcctgcctcagcctcctgagtaagtgggactacaggtgtgcaccaccacgcccagctaattttttgtatttttagtagagacagggtttcaccatgttggccaggatggtctggatctcgacctggtgatccgcccacctcagcctctcaaagtgctgggattacaggcgtgagccactggacctggcctggaaacttacttttaagaaaaaagtggccaggcgtggtagctcacacctgtaatcccagcactttgggaggctgaggcaggtggattacctgaggtcaggagttcaggaccagcctggccaacatggtgaaaccccatctctactaaaaaatacaaaaattagctggttatggtggcgggtgcttgtaatcccagctactcgggaggctgagacaggagaattgcttgaacctgggaggcggaggttgcagtgagccgagatcacgccattgcactccagccagggtgacaagagtgaaactccgtctcaaaaaaaaagaggaaaaagattactggtacaaatacaaagtctaaaccatataataaatattagaagataaacataattttttgaacttctcaggctatccacaagttaaaacaagtcagtagtatagccccaaaatggaaatgttaagtttctaatcagcctaatccaataaaatagtatgcatttatcaaatgaacctatcaaattattccagtaaatttttctcttaatccagttttttcctattgattttggggggtgggggtatgaaaaggaagtatagtgaggggtcaatctaagagacccacttgtagaagtgtgggtgctggaagaagtgggacctggtgtaccagtttcactaagataaatgggtaggcaacagactagctgattttcctgactcagccagagggaaaaaatgaagagatgttagggccgagacagaggcagtatgaacaagatggtagtgtctttttcctcatggagttacctgtctagtgaaatatgagtctttgcaggttcttaagaaaggtagtgttagccagatttggtggctcacacctgtaatctcagcactttgggaggccagggtgggaggatcaactgagtcaggagttcaagacagcttggccaacatggcgaaaccccatctctactaaaaatacaaaaattacccgggcatagtggcgagtgtctgtgatcccagctacttgggaggcggaggcggaggcagagaattgcttgaacctgggaggcagaggttgccatgacctgagatcgcaccactgcactccagcctgtgcaacagagtgagactctgtctcaaaaaaaaaaaaaaagcgttaaaagcagagctttgggaagacttggaagagagacagagactagctatagaaagaccagatggggataagagctgagtaatcagcgctcaccaccaatagggccagtcacggttttctaagtaagtgccttccatgtattatttcatttaatcctggggaaaaccctataattgcagctaactggctttccgatgagatttattgaatcctgtcttgccaaagggcacctgactgtgagtcagcctgagcccagtggtggctgcagtcagaggtaaggatataaacctgagagagacagcaaatgagcagcctgtagttttattatctttagtagttactcagcccttggcctgcagatacagctcctgtgaatcccctttctgtgttctattaggtttacattaaaatggcaaaaaccgcgattacttttgcaccaaccaaatacttccatatccaactactgctagacccttgtgtgtgtgtgtgtgtacgcttatccacacacacacacacacgttactgtacagtctgtgaggagtaaaatcctcagtgcttaggatcccagagtcagttattttgtttcgtcagaaagactgtcctggctgccacctacatggttattatgtgagttctgccatgattccagggatctgctcagctctgtggcatgggcccagtttactcataaagcatcttgtgaccaagcacagtggctcatgcctgtaatcccaacactttgagaggccaaggcgggcagatcacttgaggtcaggagttcaagaccagcctggccaacatggtgaagccctgtctgtactacaaatataaaaattagctggatgtggtggtgcactcctgtaatcccagctactcaggaggctgaggcaggagaatcgctggaacccaggaggcggaggttgcagtgagcgaagatcacgccactacactccagtctgggtgacagagcaagactccgtctcaaaaaaaaagacctcttgtgactgctgtctttgctttccttcctccatctgaggctgtcatagcagatgccgccctccatcaggccccttgtccccctccctttggccgtcacttcttgtctgacatcttttgtgaaggtttaccctgtcttttttccatttgcttgtgatgtttatattcacacattccgctcttcccctgtcccctgtctaggattctccacagtcacatactcatttttcacaacttccttgcctccctccccaaccccatcatgtcagtgtgattttagattacactccatatatagttttatatgcagcattttttcacatagaaatttactgtgaacgttctcctttttattaactatccttccaaaacacacttttaagtttttcttgtgtggagtgactattactgagccaacccctactgaacatttggtttatttcctaattttttactcttaaacactgaccttttttttttttttggagacagagtcttgctcagtctcccaggctggagtgcagtggcgtgatttcggcttactgcaagctccgcctcccgggttcactccattctcctgcctcagcctcccgagtagctgggactacaggcgcccgccaccacacccggctaattttattttgtgttttgagtagagacggggtttcaccatgttagccaggatggtctcaatctcctgacctcgtgatccacctgcctcggcctcccggagtgctggggttacaggcgtgagccaccgtgcccagccaacactgaccatttttttaaaagttttcagctgggcaaggtggctcgcacctgtagtcgcaccactttgggaggccgaggtgggtggatcatttgaggtcaggaattcaagaccagcctggccaacatggtgaaactctatctctattaaaaatacaaaaaaaattagctgggtgtggttacgcatgcctgtaatcccagctactagggaggctgaggcaggagaatcgcttgaacctaggagactgaggttgcagtgagctgagatcgcaccactgcactctagcctgggcggcagagtgagactgtctcaaaaaaaaaaaaaaaagttttcttgtatacaaatttttctttgcatcttagattatttccttaggataaactcctagaaagggaattacctggaccaaaggatatgagaacatttgtaacactcttgatacaaattgtcaaaatgacctccagaaagatgatatggtgtctttttcaaaggaaaagttaaagtgctttttaagatttagaaggtattatctttttgcttttcacaggggacagtcaaaacttcacaggggggaaatcaagttaaattcagagctggatttagatgatgccattctagagaagtttgctttctccaatgctctatgcctttct

SEQ ID NO: 13768 - DNA, 730 bp, Homo sapiens
ccagttgagtgtggcttccctttcagaataatccattccatctttttgcctggcgggagggagcaagttcttttcaagattgagctgaaatttgcctcccagtaacttcattctcttcatcttcatcccatcccttgtatcacccttggagatgtttgaagaaaattctggagttctagctttgcagaatggagtccagtagggtgctcagcagccgtcacagatgcttcagcctcttggtaacccatgttatgctcatttccctggaacaggacctaatgcactgcacagcatttgcaacggcagatgagtatcatctgggaaatctgtctcaagatctggcctcccacggatatgttgaagtaacaagcttgcctagaggtacttcttcttgaacctggggccaaatgcagcaaatattttggtgatgggtgtggaaaattctgcaaaagaaggtgatcctggaacaatattcttcttcagggaaggagctgctgtgttttggaatgtgaaagacaaaactatgaagcatgtgatgaaagttctagaaaaacatgaaattcagccctatgaaatcgcactggtacactgggaaaatgaagaacttaactacataaaaatagagggacagtcaaaacttcacaggggggaaatcaagttaaattcagagctggatttagatgatgccattctagagaagtttgctttctccaatgctctatgcctttct

SEQ ID NO: 13769 - DNA, 7105 bp, Homo sapiens
gcagtcctgccgaggaagcgtgcgtccctggcgcttccttcttctcttccggcggagaggttagtgtattgccttttctttagcagctcgagtggtccggcttggaggtctgcgccctggctcctggccgcccggaacgtgtacagttacgggttacgccagtgcggctgtgaccctttgcctcttaccgtgatctttggtcagcttagctgggagtaaaaagcactcaattaatgaaccctttttttgagccagtgcaccgcggtaactgtagaaatcgataaaataattttgagtttgaggaattgaacggcatactcccaaagatgagcgccacttagctctcgaatcgtagcctagctgtaatcgattttcttaattggtgtaattgttctctaaaagttgaaatgtgcccgggaactgagtaactgccttgtatttcattttaaaaattcgatcgaatgcctactatgtgctgggcgctattgtcaggagatataataggaaaaaacacaaatccgtatcctcagggagcttccattctggaaggaagacacaaaaatctgccctttcctcttatttttttcctttagctttgtgtctcacgtattttactgatttacctcgttttgtctgtcactcccaatgcaaggttcaaaagattcaaaagataggatttttgtctattttattttcagctgtattgtcagcaactaggacaatacctggcacatgataagaactgagttcgtttgcagtatgaattaataaactaaaaattaaaggtgtgcaagtgatgttaaacaatggagaaatgcaaagtggaggaagataagagaatggatgctggttgtgtttttttttttttttttttttattgatcattcttgggtgtttctcgcagagggggatttggcagggtcataggacaatagtggagggaaggtcagcagataaacaagtgcacaaaggtctctggttttcctaggcagaggaccctgcggccttccgcagtgtttgtgtccctgggtacttgagattagggagtggtgatgactcttaaccagcacgctgccttcaagcatctgtttaacaaagcacatcttgcaccgcccttaatccattcaactctgagtggacacagcacatgtttcagagagcacagggttgggggtaaggtcaccgattagcaggatcccaaggcagaagaatttttcttagtatggaacaaaatgaaaagtctcccatgtctacttctttctacacagacacggcaaccatccgatttctcaatcttttccccccctttcccccctttctattacacaaaaccgccattgtcatcccgtcccgttctcaatgagctgttgagtacacctcccagacggggtggtggccgggcagaggggctcctcacatcccagtaggggcggccgggcagaggcgcccctcacctcccggacggggcggctggccgggcggggggctgacccccccacctccctcccggacggggcggctggccgggcggggggctgaccccccacctccctcccggacggggcggctggccgggcggggggctgacaccccaccttcctcccggacgggggctggcccccccacctccctcccagacggggtggctggccgggcggggggctgacccccacctccctcccggatggggtggctggcctggcgggggctgacccccacctccctcccggatggggtggctgccgggcggagggtctcctcacttctcagatggggcggccgggcagaggcgctcctcacatcccagacggggcggcggggcagaggtgctccccacatctcagacgatgggcggccgggcagagactcccctcacttcctagatgggatggcggccgggaagaggtgctcctcacttcctagatgggatggcggccgggcagagacgctcctcactttccagactgggcagccaggcagaggggctcctcacgtcccagacgatggggggccaggcagaggctgcaatctcggcactttgggaggccaaggcaggcggctgggaggtggaggttgtagcgagcctcgatcacgccactgcactccagcctgtgcaccattgagcactgagtgaaccagactccgtctgcaaacccggcacctcgggaggccgaggctggcagatcactcgcggttaggagctgcagaccagcccggccaacacagcgaaaccccgtctccaccaaaaaagtacgaaaaccagtcaggcgtggcggcatgcgcctgtaatcgcaggcactcggcaggctgaggcaggagaatcaggcagggaggttgcagtgagccgagatggcagcagtacagtccagcttcggctcggcatcagagggagaccgtggggagagggggaccgtggggagagggagaggagggagagggagagggctggttgtgtgtttttaatgtagtggttggggaaggcttcactgggtagaagacattttagcaaacatctgaaggaggtgagggtgtgagcctttcagatccctgggagaagagcgtaaggaacagcaagtgcacagatccagagaccagaatgaggagcaaaataagcaaaggagagtgctgtcaaagtggtgataaaggacagataatgtagtgccatgcaggccattctgaggggtttagcttttttttttttttttcgttacagaatctcactctgtcgcccagactttagtgcagtggcgcgatctcggctcactgcaacctccacctcccgggttcaggcgattctcctgccttggcctcccgagtaactgggattacaggcacccgccgccacgctcagctaatttttttgtatttttagtagagacgaggtttcaccatgttggccaggctggcctcgaacatctgaccttgtgaatcacccgcctcggcctcccaaaatgctggggttacaggcgtgagccaccgcgccaggctttttttttttttttttttttttttttgagacagagtctcgctttgttgctcattctggagtgcagtggcgcaatctccgcctcccagattcaagccattctcgtgcctcagcctcccaagtaactgggattataggcccatgccaccatgcccggctgatttttgtatttttagtagacacggggtttcgccgtgttggccaggctggtctggaactcctgaccccaagtgatccctcccaaagtgctgagattacaggcgtgagccgccatgcctggttggagggctttggcttttattaagtgaaccgtgaagccacagctagatttcgcgttgagattcaacttcaaaggatcactttggttgctgtgttgagaagaaactgtagggggcccaaaacagaatcaggaaaactggttaagaagctattataataatccatgggaaggatagcagtttggatcaggtagtattattactgatgatgagcagtggtccctagaaggcccttgggatttactgagaagttggatatggagaataaagagtcaagctggaccccacgtttttggcttagcagttataaagatacttattactgctcatgaatgggaaagactgggaagaaagggatgcaagggattctaggggtataagggagaggttagaatggtagaccatggagtgtaaactggatatggaggaagtgaagtcatggggagtgagagacagtgaaaaggtggttggatcattgacttgtgggtcctgttggggttgaagaattattggaattgggtaatagaaggagtgagatgcaaagataggaggtggtgcttagagagtaaaatggatgaaactgagatgaggaggtccgatgtattgataatgacaatagggccctgtctgatagaaaaacagtgtaaggcacaaatgtaatcttaggctttctagaaggtgcagtgataaaaatgggctgggtccggtggctcacgcctgtaatcccaacactttaggaggccaaggcaggtggatcacctgaggtcaggatttcaagaccagcctggccaacataatgaaaccccgtctctactaaaaatacaaaaaaattaactaggcatggtggcagacacctgtaatcccagctactcgggaggctgaggcaggagaatcgcttgaaccggggaggcggaggttgcagtgagctgaggtggcaccactgcactccagcctgagtgacagagcgagactcccatctcaaaaaaaaaaaaaaaaaaaagaatttactcaaagagaataaaaagaatccaggactgtagacaaacttctaaaatattttatagtttcttcaaaattaagtggttcaactggcatggcatagtactaattaaaggtgaactacagtagccaattggactagaatgaagcacagaatgcgagcttttgaagggattttggaagcagcaggttctacctcctaaatatcactgtgaatcatctttgtccttatcctgaagagaggtagtaaatacaaggtagtgggtaagagtgttgactttggaattgggaaagcctgggttttattttagttacatctctgcagcttcttaacggtgagcacttagcctctttaaacctcagtttcctaatcagtgaaatgggatcattatgaggtgaagccgagcacttagcatgtagaaagcgctcagagtgatgtcagagtctgtcttgtttcctcctacatatcatcaccaaaaatttgtttcatgaacatgcatttgaccgtgtgactctgagttaaaagctcagctttctccccacctgtagaaactttttaggatgactttatatatcctttggtgatctggccatcggctcttttggtccttacctcctgcagctcactcctacctccccgagatggggagatgaataggactccatgcctggggtgtttaacttgctgatccttctgccctttcaagactcagttcaaatgtcacctctgtgacaatgccacactcttcacatgctcctttctctggactagagcaatttgtgcatctcgttcattttcctctgctagactttgaattctgagatcattgattcatctatctctagcacctaacatattatttttaaaaaaagaattattgattactacggtctaacttttttttttttttgagacagagtctcattctgtcgcccaggctggagtgcagtggggcaatcctggctcactgcaacctctccctccctggtttgaacgattctatatctcagccacctgagtagctgggattaaagccactatgcttggctaatttttttttgtatttttagtagagatggggttttgccatgttggccaggctggttttgaactcctggcctcaagtgatccccccagcctttagcctcccagagtgctgggattacaggcgtgagccaccatgtgtggcctactataggctaactttaaaataacacatttcatactgtaaataagggggaaattctgtttaccttgtctggaatgttcatgtgtgtatctgacatgcctcgcactcccatgcccagccccaagctgaaaagcaccttcgccttctagaatcagcttagatctttctgggaacctttcctgattttttttttttttttcctgagacagaaaaagggctggaatgcagtggtacaatcatgactcactgcagcctcagtcttctgggctcaagtgatcctcccacctcagcctgtgagtagctgggactacaggcatgagctgccatcacacccagctaatttttaaatttttgtcatttttgtagagatgaggtttcaccatgttgcctcagctggtctggaactcttggactcaagcgatccacctgcctcagcctcccagtgtgctgggattacaagtgtgagctacagtgcctggccagcacagatttttatatacttgatatgctaatgaagtaaatgaagtggtcccatcactattttttttaaggttcttgttatgtcagtagctttataatcttgtaatcttccaggaagaaggccaaatgttgctaaaggcaaagtggcagaaacactgtacttatatttttaaccttgttcttttactagaattaacttagaatgtatctgttttacaaatttttctaacagaaatatgcctgctacctagggaaatattatatatgttttaaacattaatttaaaaacttgaactttgaattccttttcttttagcttgggatgtggtaatgccagccacactcctcagagccgtggccagatctcatcatatattatcaaaagcacatcagtgccgaagaatcggtcatctaatgttaaaaccacttaaggaatttgaaaatacaacatgcagcacactgacaatacgtcaaagcttggatttgttccttcctgataaaacagctagtggtttgaataagtctcagatcctggaaatgaaccaaaaaaagtcagataccagcatgctgtctccattaaatgctgctcgttgccaagatgaaaaggcacaccttccaaccatgaaatcctttggtactcacaggagagtgacccacaaaccaaatctgttgggttctaaatggtttataaaaatattaaagaggcatttctcatctgtatcaacggaaacatttgttccaaaacaagacttcccacaggtgaagagaccactaaaagcatccaggaccagacagccatccaggaccaaccttccagttctgtctgtgaacgaggtaaagtaggggtggccgtggctctcgtgcttagtgatcattgctcatgctaaaccagtgtgcgttgcaccccagccttaccgccaacgtaagagaactagcagtcactcagacttcttcatcaaggtctttgaagcctaataaatatccaaagggattcagaatcttaatttttaacaattaatgatacatataaaaacaaaatacaggtgataacacatgaaaatagagtttataaaagatttggttattggtctaaggaaactgaaaaagaggaccaatattaagtccagtctaagaatgggactgtaaaaaaaaataaaataaaaaaaaacaaa

SEQ ID NO: 13770 - DNA, 915 bp, Homo sapiens
gcagtcctgccgaggaagcgtgcgtccctggcgcttccttcttctcttccggcggagagcttgggatgtggtaatgccagccacactcctcagagccgtggccagatctcatcatatattatcaaaagcacatcagtgccgaagaatcggtcatctaatgttaaaaccacttaaggaatttgaaaatacaacatgcagcacactgacaatacgtcaaagcttggatttgttccttcctgataaaacagctagtggtttgaataagtctcagatcctggaaatgaaccaaaaaaagtcagataccagcatgctgtctccattaaatgctgctcgttgccaagatgaaaaggcacaccttccaaccatgaaatcctttggtactcacaggagagtgacccacaaaccaaatctgttgggttctaaatggtttataaaaatattaaagaggcatttctcatctgtatcaacggaaacatttgttccaaaacaagacttcccacaggtgaagagaccactaaaagcatccaggaccagacagccatccaggaccaaccttccagttctgtctgtgaacgaggtaaagtaggggtggccgtggctctcgtgcttagtgatcattgctcatgctaaaccagtgtgcgttgcaccccagccttaccgccaacgtaagagaactagcagtcactcagacttcttcatcaaggtctttgaagcctaataaatatccaaagggattcagaatcttaatttttaacaattaatgatacatataaaaacaaaatacaggtgataacacatgaaaatagagtttataaaagatttggttattggtctaaggaaactgaaaaagaggaccaatattaagtccagtctaagaatgggactgtaaaaaaaaataaaataaaaaaaaacaaa

SEQ ID NO: 13771 - DNA, 1239 bp, Homo sapiens
aatttgaaaatacaacatgcagcacactgacaatacgtcaaagcttggatttgttccttcctgataaaacagctagtggtttgaataagtctcagatcctggaaatgaaccaaaaaaagtcagataccagcatgctgtctccattaaatgctgctcgttgccaagatgaaaaggcacaccttccaaccatgaaatcctttggtactcacaggagagtgacccacaaaccaaatctgttgggttctaaatggtttataaaaatattaaagaggcatttctcatctgtatcaacggaaacatttgttccaaaacaagacttcccacaggtgaagagaccactaaaagcatccaggaccagacagccatccaggaccaaccttccagttctgtctgtgaacgaggacctaatgcactgcacagcatttgcaacggcagatgagtatcatctgggaaatctgtctcaagatctggcctcccacggatatgttgaagtaacaagcttgcctagagatgcagcaaatattttggtgatgggtgtggaaaattctgcaaaagaaggtgatcctggaacaatattcttcttcagttgtttcttttatttttttaaatcagggaaggagctgctgtgttttggaatgtgaaagacaaaactatgaagcatgtgatgaaagttctagaaaaacatgaaattcagccctatgaaatcgcactggtacactgggaaaatgaagaacttaactacataaaaatagagggacagtcaaaacttcacaggggggaaatcaagttaaattcagagctggatttagatgatgccattctagagaagtttgctttctccaatgctctatgcctttctgtaaaactggcaatttgggaagcatcactggataaatttattgaatctattcagtcaattcctgaggctttaaaagctgggaagaaagtgaaactatctcatgaagaagttatgcagaaaatcggtgaactctttgctctaaggcaccgtataaacttgagttcagacttcctgattactcctgatttctactgggacagagaaaacctggaaggactttacgataaaacgtgtcaattccttagcattggccgaagagttaaggtcatgaatgaaaaacttcagcactgcatggaactaacagatctaatgcggaatcacctgaatgagaagagggcactccgcttggagtggatgattgtcatcctcattaccataga

SEQ ID NO: 13772 - DNA, 1914 bp, Homo sapiens
ggagatgggttggctgcagtagtgagaggctgggggtgcggctctttccctgcagtcctgccgaggaagcgtgcgtccctggcgcttccttcttctcttccggcggagagcttgggatgtggtaatgccagccacactcctcagagccgtggccagatctcatcatatattatcaaaagcacatcagtgccgaagaatcggtcatctaatgttaaaaccacttaaggaatttgaaaatacaacatgcagcacactgacaatacgtcaaagcttggatttgttccttcctgataaaacagctagtggtttgaataagtctcagatcctggaaatgaaccaaaaaaagtcagataccagcatgctgtctccattaaatgctgctcgttgccaagatgaaaaggcacaccttccaaccatgaaatcctttggtactcacaggagagtgacccacaaaccaaatctgttgggttctaaatggtttataaaaatattaaagaggcatttctcatctgtatcaacggaaacatttgttccaaaacaagacttcccacaggtgaagagaccactaaaagcatccaggaccagacagccatccaggaccaaccttccagttctgtctgtgaacgaggacctaatgcactgcacagcatttgcaacggcagatgagtatcatctgggaaatctgtctcaagatctggcctcccacggatatgttgaagtaacaagcttgcctagagatgcagcaaatattttggtgatgggtgtggaaaattctgcaaaagaaggtgatcctggaacaatattcttcttcagggaaggagctgctgtgttttggaatgtgaaagacaaaactatgaagcatgtgatgaaagttctagaaaaacatgaaattcagccctatgaaatcgcactggtacactgggaaaatgaagaacttaactacataaaaatagagggacagtcaaaacttcacaggggggaaatcaagttaaattcagagctggatttagatgatgccattctagagaagtttgctttctccaatgctctatgcctttctgtaaaactggcaatttgggaagcatcactggataaatttattgaatctattcagtcaattcctgaggctttaaaagctgggaagaaagtgaaactatctcatgaagaagttatgcagaaaatcggtgaactctttgctctaaggcaccgtataaacttgagttcagacttcctgattactcctgatttctactgggacagagaaaacctggaaggactttacgataaaacgtgtcaattccttagcattggccgaagagttaaggtcagaagtctggcatggcctaaagttaagatgttgattcctctttggagactgcgagtggaatccatttcctcaccttttccagtgactggaggccacccatattccttgctcatggccccctcctccatctagcaaaggcctgtggaatcctcatattgtatcattctgaactcttctgccccgcatttccacttttaaggacccttgtgattacattgggcttacccagataatctaggattatctcatcttaaggtcatgaatgaaaaacttcagcactgcatggaactaacagatctaatgcggaatcacctgaatgagaagagggcactccgcttggagtggatgattgtcatcctcattaccatagaggtaatgtttgagctgggacgagtatttttctgatcaagtgataaccaaagtgtcactgcaagagatattcaagttctacaatcaaaaattaaatgttcggcccggcgcggtgcctcatgcctgtaatcccagcactttcggaggccaagaagggtggcttgagatgagatcaggagctcaagacaagcctggccaacatggtgaaaccccatctc

SEQ ID NO: 13773 - DNA, 1596 bp, Homo sapiens
tgggcgggagcgcccttccaggagatgggttggctgcagtagtgagaggctgggggtgcggctctttccctgcagtcctgccgaggaagcgtgcgtccctggcgcttccttcttctcttccggcggagagcttgggatgtggtaatgccagccacactcctcagagccgtggccagatctcatcatatattatcaaaagcacatcagtgccgaagaatcggtcatctaatgttaaaaccacttaaggaatttgaaaatacaacatgcagcacactgacaatacgtcaaagcttggatttgttccttcctgataaaacagctagtggtttgaataagtctcagatcctggaaatgaaccaaaaaaagtcagataccagcatgctgtctccattaaatgctgctcgttgccaagatgaaaaggcacaccttccaaccatgaaatcctttggtactcacaggagagtgacccacaaaccaaatctgttgggttctaaatggtttataaaaatattaaagaggcatttctcatctgtatcaacggaaacatttgttccaaaacaagacttcccacaggtgaagagaccactaaaagcatccaggaccagacagccatccaggaccaaccttccagttctgtctgtgaacgaggacctaatgcactgcacagcatttgcaacggcagatgagtatcatctgggaaatctgtctcaagatctggcctcccacggatatgttgaagtaacaagcttgcctagagatgcagcaaatattttggtgatgggtgtggaaaattctgcaaaagaaggtgatcctggaacaatattcttcttcagggaaggagctgctgtgttttggaatgtgaaagacaaaactgggacagtcaaaacttcacaggggggaaatcaagttaaattcagagctggatttagatgatgccattctagagaagtttgctttctccaatgctctatgcctttctggctttaaaagctgggaagaaagtgaaactatctcatgaagaagttatgcagaaaatcggtgaactctttgctctaaggtaaaagttttctctctaaataaaatatttcatatatttaacaatctcaagaaaacattcccatagttctgtggtgaagagcaaacatttacacgtttatgggaactgtagctgttttcatttcattgattataagcagggagaactcttacccattagaagtagttgggctgtgttaagactgtactgaaagaaatcacgcatgtgcaaaagagatcacgattcatctacattaaacccacattaaggagcacagtaggtgttctttgaaggtagaaagacatattcctgaatttggttaatgggaattctctgtaaaaatatatcactgcatcataatgctaaataggcttaattgctacagaaaagtttctttgaatctgagacaccaagatgccactggagagaaaaactgctgccagttaaactatgacaatactttttttatcagaggattaaaattttacacttactgaaatatcttttaatcttagctggatataaattatatcacattccctcttgggcatatatgaaaa

SEQ ID NO: 13774 - DNA, 2052 bp, Homo sapiens
gggtgcggctctttccctgcagtcctgccgaggaagcgtgcgtccctggcgcttccttcttctcttccggcggagagcttgggatgtggtaatgccagccacactcctcagagccgtggccagatctcatcatatattatcaaaagcacatcagtgccgaagaatcggtcatctaatgttaaaaccacttaaggaatttgaaaatacaacatgcagcacactgacaatacgtcaaagcttggatttgttccttcctgataaaacagctagtggtttgaataagtctcagatcctggaaatgaaccaaaaaaagtcagataccagcatgctgtctccattaaatgctgctcgttgccaagatgaaaaggcacaccttccaaccatgaaatcctttggtactcacaggagagtgacccacaaaccaaatctgttgggttctaaatggtttataaaaatattaaagaggcatttctcatctgtatcaacggaaacatttgttccaaaacaagacttcccacaggtgaagagaccactaaaagcatccaggaccagacagccatccaggaccaaccttccagttctgtctgtgaacgaggacctaatgcactgcacagcatttgcaacggcagatgagtatcatctgggaaatctgtctcaagatctggcctcccacggatatgttgaagtaacaagcttgcctagaggtacttcttcttgaacctggggccaaatgcagcaaatattttggtgatgggtgtggaaaattctgcaaaagaaggtgatcctggaacaatattcttcttcagggaaggagctgctgtgttttggaatgtgaaagacaaaactatgaagcatgtgatgaaagttctagaaaaacatgaaattcagccctatgaaatcgcactggtacactgggaaaatgaagaacttaactacataaaaatagagggacagtcaaaacttcacaggggggaaatcaagttaaattcagagctggatttagatgatgccattctagagaagtttgctttctccaatgctctatgcctttctgtaaaactggcaatttgggaagcatcactggataaatttattgaatctattcagtcaattcctgaggctttaaaagctgggaagaaagtgaaactatctcatgaagaagttatgcagaaaatcggtgaactctttgctctaaggaggctgaggcaggaagatcacttgagcccaggagtttgaggctgcggcaccgtataaacttgagttcagacttcctgattactcctgatttctactgggacagagaaaacctggaaggactttacgataaaacgtgtcaattccttagcattggccgaagagttaaggtacgtattttgcacttctaatgagagaaaaagacacgttgtcgcctataagttgaatatgtttaactgcttgcagagaaatatcttgtttgacttccattcaaatctctttatatttccccttcttgtcctctgtacagtcacttcaattttttgtgtcaaaggatcttctgatattagctctacagactagataaggttggtgaataagatgagagtttggaagcctaatggtccatcagtaagttcttgtcaagtttcaagcaagagttcatgactgcttctgatctgtcatggtgacagtgagaatagaaataaatttaagaaagaatcatgtaagacaaatcaagtgatgggtaataagaggccatggagaagaaagaataaaggatgactgatgtttgcctggaggtgacaagtagaaaggtggaaaaacaataatgagaggtcagagaggggaggtgacagactaaatctaagatatgctgagattagagtagcaacaagatatccaattagctccgtcatgcaggcatttagaagggcagaagcaaagtcgggaaaagagacgtgtattaagaaatcccagcactttgggaggctgaggcggatggatcacctgaggttgggagtttgagaccagcctggccaacatggcgaaaccctgtctctactaaaaatacaaaaa

SEQ ID NO: 13775 - DNA, 995 bp, Homo sapiens
caggaagaaggccaaatgttgctaaaggcaaagtggcagaaacactgtacttatatttttaaccttgttcttttactagaattaacttagaatgtatctgttttacaaatttttctaacagaaatatgcctgctacctagggaaatattatatatgttttaaacattaatttaaaaacttgaactttgaattccttttcttttagcttgggatgtggtaatgccagccacactcctcagagccgtggccagatctcatcatatattatcaaaagcacatcagtgccgaagaatcggtcatctaatgttaaaaccacttaaggaatttgaaaatacaacatgcagcacactgacaatacgtcaaagcttggatttgttccttcctgataaaacagctagtggtttgaataagtctcagatcctggaaatgaaccaaaaaaagtcagataccagcatgctgtctccattaaatgctgctcgttgccaagatgaaaaggcacaccttccaaccatgaaatcctttggtactcacaggagagtgacccacaaaccaaatctgttgggttctaaatggtttataaaaatattaaagaggcatttctcatctgtatcaacggaaacatttgttccaaaacaagacttcccacaggtgaagagaccactaaaagcatccaggaccagacagccatccaggaccaaccttccagttctgtctgtgaacgaggtaaagtaggggtggccgtggctctcgtgcttagtgatcattgctcatgctaaaccagtgtgcgttgcaccccagccttaccgccaacgtaagagaactagcagtcactcagacttcttcatcaaggtctttgaagcctaataaatatccaaagggattcagaatcttaatttttaacaattaatgatacatataaaaacaaaatacaggtgataacacatgaaaatagagtttataaaagatttggttattggtctaaggaaactgaaaaa

SEQ ID NO: 13776 - DNA, 995 bp, Homo sapiens; identical to SEQ ID NO: 13775

SEQ ID NO: 13777 - DNA, 1027 bp, Homo sapiens
aagtaacaagcttgcctagagatgcagcaaatattttggtgatgggtgtggaaaattctgcaaaagaaggtgatcctggaacaatattcttcttcagggaaggagctgctgtgttttggaatgtgaaagacaaaactatgaagcatgtgatgaaagttctagaaaaacatgaaattcagccctatgaaatcgcactggtacactgggaaaatgaagaacttaactacataaaaatagagggacagtcaaaacttcacaggggggaaatcaagttaaattcagagctggatttagatgatgccattctagagaagtttgctttctccaatgctctatgcctttctggctttaaaagctgggaagaaagtgaaactatctcatgaagaagttatgcagaaaatcggtgaactctttgctctaaggcaccgtataaacttgagttcagacttcctgattactcctgatttctactgggacagagaaaacctggaaggactttacgataaaacgtgtcaattccttagcattggccgaagagttaaggtcatgaatgaaaaacttcagcactgcatggaactaacagatctaatgcggaatcacctgaatgagaagagggcactccgcttggagtggatgattgtcatcctcattaccatagaggtaatgtttgagctgggacgagtatttttctgatcaagtgataaccaaagtgtcactgcaagagatattcaagttctacaatcaaaaattaaatgttcggcccggcgcggtgcctcatgcctgtaatcccagcactttcggaggccaagaagggtggcttgagatgagatcaggagctcaagacaagcctggccaacatggtgaaaccccatctctactaaaaataccaaaattagccaggtgtgttggcacacgcccgtcatctcagctactcaggaggctgaggcaggagaatctcttgaacttgggaggcggaggttgcagtgagctaagatcacaccactgcactccagccagggcaacagtg

SEQ ID NO: 13778 - DNA, 16040 bp, Homo sapiens; identical to SEQ ID NO: 1249

SEQ ID NO: 13779 - DNA, 4528 bp, Homo sapiens
gtacccaggcgcaccggcaggagagcggcaccgtggctgccgcagcgcgcagaggctgtggaggggcttacggctcccagcccacgggtctcagacccaggggctgggcccccagcccccagtcccgatcccagctgggtcgagccatgctgcgctacctgctgaaaacgctgctgcagatgaacttgttcgcggactctctggccggggacatctccaactccagcgagctgctcttgggcttcaactcctcgctggcggcgctcaaccacaccctgctgcctcccggcgatccctctctcaacgggtcaagggtaggaccggaggacgctatgccccgcatcgtggagcagccgccagatctgctggtctcccgaggcgagcccgccacgttgccctgccgcgctgaaggccgaccccgacccaacattgagtggtacaagaacggggcgcgtgtggccactgtgcgggaggatccgcgtgcgcaccgcctgctgctgcccagcggcgccctcttcttcccgcgcatcgtgcacgggcgccgcgcgcggccggacgaaggtgtctacacttgcgtggctcgcaactacctgggggcagcagcgagcagaaacgcctcgctggaagtggcagtcctccgtgatgatttccggcagtctcctggaaacgtggtggtggcagtgggggagccagcagtactggaatgcgtgcccccccgcggccacccggagccttccgtgtcctggaggaaggacggtgcaagactcaaggaagaggaaggaaggatcacgatccgtggagggaagctgatgatgtcacatacactcaagagcgatgcaggcatgtatgtgtgcgtagcctccaacatggcgggagaacgggagagtgcggcagctgaagtcatggtactggagcgtccctcattcctgcgcagaccagtgaatcaggtggtcctggctgatgcccctgtgactttcctatgtgaggtgaagggggatcccccacctcgtctacgctggcgcaaggaggatggggaactgcccacaggcaggtatgagatccggagtgaccacagcctttggattgggcatgtgagtgccgaagatgagggaacgtacacctgtgtggcggagaacagtgtgggccgcgctgaagcatctggctccctcagtgttcacgtcccaccccagttggtgacccagccccaggaccagatggcagctcctggagagagcgtggctttccagtgcgagaccaaaggaaaccccccacctgccatcttctggcagaaggaggggagtcaggtcctgcttttccccagtcagtcacttcagccgacggggcgcttctcagtgtctccaagaggccaacttaacatcaccgcggtgcagcgtggggatgctgggtactacgtgtgccaggctgtcagtgtggctggcagcatcctggccaaggccctgctggagataaaaggagcctctttggatgggctgcctcctgtcatcctccagggaccagccaatcagacgctggtgcttggctcctccgtgtggctgccctgcagagtgactgggaaccctcaacccagtgtccgatggaagaaggatgggcagtggctgcagggggatgacctccagttcaagacaatggccaacggtaccctgtacatcgccaatgtgcaggagatggacatgggcttctacagctgcgtggccaagagttccacaggggaagccacatggagcggctggcttaagatgcgggaagactggggagtatcaccagacccccctacagaacccagttcccctccgggggctccctctcagccagtggtcactgagatcaccaagaacagcattaccctgacctggaagcccaacccacaaactggggctgcagtcacgtcttatgtgatagaggccttcagcccagcagctggcaacacatggcgtactgtggcagatggcgtgcagctggagacacacacagtcagcggtctgcagcccaataccatctacctgtttctggttcgagcagtgggagcctggggcctcagtgagcccagccccgtctctgagcctgtccgtacacaggatagcagcccctctaggccagtggaggacccatggagaggccagcagggactggcggaagtggctgtgcgcctgcaggagcccatagtcctgggaccccggaccctgcaggtgtcctggactgtggatggcccagtccagctggtgcaaggtttccgggtgtcttggagggtagcaggccctgagggaggaagctggacaatgttggacctacagtccccaagccagcaaagtactgtgctaagaggactccctccagggacccaaatccagatcaaggtgcaagcccaaggccaggaggggctgggggctgaaagcctctctgtgaccaggagcattcctgaggaggcccccagtggccccccacagggagtggcggtggccttggggggtgatggcaacagcagtatcactgtgtcctgggaacctccactcccctcccagcaaaatggggtcatcacggaataccagatctggtgcctgggcaatgagagccgctttcacctcaatcgatctgcagcaggctgggcacgctccgcaatgctccgaggactggtgcccggtctcctctatcgaaccctggtcgcggcggccaccagcgcaggcgtgggcgtgcccagtgccccagtgctggtgcagctgccgtccccgccggacctggagcccgggctggaggtgggcgcggggctggcggtgcggctggcgagggtgctgcgggagcccgccttcctcgcgggcagcggcgcagcctgcggggcgctgcttctcgggctctgcgccgccctctactggcgccggaaacagcgcaaagagctcagccactacacggcctcttttgcctacacaccggcagtgtccttcccgcactcagagggcctctctggagccagttccaggccacccatgggccttggccccgccccctactcatggctggcagattcgtggccccacccatctcgaagcccctcggcccaggaacccaggggaagctgctgccctagcaatcctgacccggacgacagatattacaacgaagcgggaatctccctgtatctagctcagacggccaggggcacggccgcccctggcgagggtcctgtctatagcaccattgacccagcgggggaggagctgcagaccttccatgggggcttcccccaacatccctcaggagatctgggtccctggagccagtacgctcctccagagtggagccagggggacagtggagccaagggaggcaaagtgaagcttctggggaaacctgtgcagatgccctctctgaactggccagaagccctgcccccacctcctccttcttgtgaactgagctgcctagaagggccggaggaggagctggagggcagctcagagccagaggagtggtgcccgccaatgcctgagagaagtcacctgacggagcccagctccagtggagggtgcctggtcaccccatcccgaagggaaaccccctctcccacaccttcctatggacagcagtccacagccactcttacaccctcacctcctgaccctccccagcccccaactgacatgccccatctccatcagatgcccaggagggtgccccttgggccgagttcccctctcagtgtatcccagcccatgctgggcatccgtgaagcgaggcctgctggcttgggtgctggccctgcagcctcaccccacctcagccccagtcctgcccctagcacagccagcagtgccccaggcagaacctggcaggggaatggggagatgactcccccacttcaaggaccccgtgctcgattccggaagaaacccaaggctcttccctacaggagggagaacagtcctggggacttgcccccaccacccttgccaccgccagaggaagaggcgagctgggccctagagctgagggcagcaggcagcatgtcctccctggagcgggagcgcagtggggagaggaaagcggtccaggccgtgcccctggcagcccagcgggtgctccacccagatgaagaggcctggctcccatacagcagaccaagcttcctgtcccggggccagggcaccagcacatgttccacggccggcagcaactcttccaggggctccagcagctctaggggctcccggggccctggccggagccggagtcggagtcagagccggagccagagccaaaggccaggacagaaacgccgagaggaaccaagatgacccttgttggggcattgagaatatcatgagtgccacggggaaggggagtagggatgtcttttcccccccagcagtgatgagtggggctagctgaagcccattggtttccacgatttcaattggctgagaaggcagagagctagctcctccctttctttctttttccacctgagacttgtttataaaaaacaaaacaataaaaagagtctgatcagagccca

SEQ ID NO: 13780 - DNA, 2151 bp, Homo sapiens
agccctgcccccacctcctccttcttgtgaactgagctgcctagaagggccggaggaggagctggagggcaggtagagatgctccctgcttccaggcccacacacctgcggccagaccatgggctgctggggaggaaggggagggggcagcaggaaggccaacgggaaggtatggaagcagctgagccctttccttctctcctgcctctttgatcccagctcagagccagaggagtggtgcccgccaatgcctgagagaagtcacctgacggagcccagctccagtggagggtgcctggtcaccccatcccgaagggaaaccccctctcccacaccttcctatggacagcagtccacagccactcttacaccctcacctcctgaccctccccagcccccaactgacatgccccatctccatcagatgcccaggtagggaggtatatagtacctcactcattgcaagccctctatacgtatctactcagtagatgactgggtgggtggatggatggatgggtggatggatctggggtacagaggtctcagggctgtgtcagggtggaagtgtaatttgggcaggaatatggaggctgacaagatctctcatgcccattagactggctcttgctggagtggtcagcactctacctgagacatttcagatatggctctccttatgcttctctagcttgggaggacttacgggcggacgggttgtgtctcgtttatctgttaggttgattgtctagcacagtgccaggcacatagtaggcattcagtttttgtggagggaacagaggctgcggcctcctgtcattgcaggagggtgccccttgggccgagttcccctctcagtgtatcccagcccatgctgggcatccgtgaagcgaggcctgctggcttgggtgctggccctgcagcctcaccccacctcagccccagtcctgcccctagcacagccagcagtgccccaggtaagtctctacaacctccttttgccccccggctccctccagtgcttgcttccccttcacccttaggcctttttcctgatttttgcccttacccattcctcttcccgtctcctaacactgcaggcagaacctggcaggggaatggggagatgactcccccacttcaaggaccccgtgctcgattccggaagaaacccaaggctcttccctacaggagggagaacagtcctgggggtgaggggggatgcacctgggagatggtgacagtagtggcggggggataggcaggaaaccaagggtgcactctgggggctggaggagggaacaggtgaaccccaatcttgggctgttcattggcagcctcctggtgccagggaatgcaggtgagagaaagattagtgacaggagtggcaggaggctccgctgaaaacagctccctccccagacttgcccccaccacccttgccaccgccagaggaagaggcgagctgggccctagagctgagggcagcaggcagcatgtcctccctggagcgggagcgcagtggggagaggaaagcggtccaggccgtgcccctggcagcccagcgggtgctccacccagatggtaagcagggccagggcaggcaggagggctgctgccacaggagactgtgggctttgggactgggggctgatagtagaccagctcagccctccctttagttaggttcatgcatttgatccacatcaaactcccctgtctctctaactctctgagcacaatcccctgaagtcccaagttgtgttcattcccaggatggaagcccagataagaggactgggctctaggtgctctgtccccgctccccacaaggctccctctgattgggagctcccccgcagcgttctgagcacccatgatgtcaaggccatgtgccggtcactctgctgctcctcagccccaggctggctgagccctgtgcctgcccttcatcttcttccagagctgagcctgtggtcagggtggcagggtgggtgacagggaagttctgcttcctgcctgcacctggctacccttccctcttgtgctgcagaagaggcctggctcccatacagcagaccaagcttcctgtcccggggccagggcaccagcacatgttccacggccggcagcaactcttccaggggctcc

SEQ ID NO: 13781 - DNA, 955 bp, Homo sapiens
agccctgcccccacctcctccttcttgtgaactgagctgcctagaagggccggaggaggagctggagggcaggtagagatgctccctgcttccaggcccacacacctgcggccagaccatgggctgctggggaggaaggggagggggcagcaggaaggccaacgggaaggtatggaagcagctgagccctttccttctctcctgcctctttgatcccagctcagagccagaggagtggtgcccgccaatgcctgagagaagtcacctgacggagcccagctccagtggagggtgcctggtcaccccatcccgaagggaaaccccctctcccacaccttcctatggacagcagtccacagccactcttacaccctcacctcctgaccctccccagcccccaactgacatgccccatctccatcagatgcccaggagggtgccccttgggccgagttcccctctcagtgtatcccagcccatgctgggcatccgtgaagcgaggcctgctggcttgggtgctggccctgcagcctcaccccacctcagccccagtcctgcccctagcacagccagcagtgccccaggcagaacctggcaggggaatggggagatgactcccccacttcaaggaccccgtgctcgattccggaagaaacccaaggctcttccctacaggagggagaacagtcctggggacttgcccccaccacccttgccaccgccagaggaagaggcgagctgggccctagagctgagggcagcaggcagcatgtcctccctggagcgggagcgcagtggggagaggaaagcggtccaggccgtgcccctggcagcccagcgggtgctccacccagatgaagaggcctggctcccatacagcagaccaagcttcctgtcccggggccagggcaccagcacatgttccacggccggcagcaactcttccaggggctcc

SEQ ID NO: 13782 - DNA, 2263 bp, Homo sapiens
ggagccaagggaggcaaagtgaagcttctggggaaacctgtgcagatgccctctctgaactggccagaagccctgcccccacctcctccttcttgtgaactgagctgcctagaagggccggaggaggagctggagggcaggtagagatgctccctgcttccaggcccacacacctgcggccagaccatgggctgctggggaggaaggggagggggcagcaggaaggccaacgggaaggtatggaagcagctgagccctttccttctctcctgcctctttgatcccagctcagagccagaggagtggtgcccgccaatgcctgagagaagtcacctgacggagcccagctccagtggagggtgcctggtcaccccatcccgaagggaaaccccctctcccacaccttcctatggacagcagtccacagccactcttacaccctcacctcctgaccctccccagcccccaactgacatgccccatctccatcagatgcccaggtagggaggtatatagtacctcactcattgcaagccctctatacgtatctactcagtagatgactgggtgggtggatggatggatgggtggatggatctggggtacagaggtctcagggctgtgtcagggtggaagtgtaatttgggcaggaatatggaggctgacaagatctctcatgcccattagactggctcttgctggagtggtcagcactctacctgagacatttcagatatggctctccttatgcttctctagcttgggaggacttacgggcggacgggttgtgtctcgtttatctgttaggttgattgtctagcacagtgccaggcacatagtaggcattcagtttttgtggagggaacagaggctgcggcctcctgtcattgcaggagggtgccccttgggccgagttcccctctcagtgtatcccagcccatgctgggcatccgtgaagcgaggcctgctggcttgggtgctggccctgcagcctcaccccacctcagccccagtcctgcccctagcacagccagcagtgccccaggtaagtctctacaacctccttttgccccccggctccctccagtgcttgcttccccttcacccttaggcctttttcctgatttttgcccttacccattcctcttcccgtctcctaacactgcaggcagaacctggcaggggaatggggagatgactcccccacttcaaggaccccgtgctcgattccggaagaaacccaaggctcttccctacaggagggagaacagtcctgggggtgaggggggatgcacctgggagatggtgacagtagtggcggggggataggcaggaaaccaagggtgcactctgggggctggaggagggaacaggtgaaccccaatcttgggctgttcattggcagcctcctggtgccagggaatgcaggtgagagaaagattagtgacaggagtggcaggaggctccgctgaaaacagctccctccccagacttgcccccaccacccttgccaccgccagaggaagaggcgagctgggccctagagctgagggcagcaggcagcatgtcctccctggagcgggagcgcagtggggagaggaaagcggtccaggccgtgcccctggcagcccagcgggtgctccacccagatggtaagcagggccagggcaggcaggagggctgctgccacaggagactgtgggctttgggactgggggctgatagtagaccagctcagccctccctttagttaggttcatgcatttgatccacatcaaactcccctgtctctctaactctctgagcacaatcccctgaagtcccaagttgtgttcattcccaggatggaagcccagataagaggactgggctctaggtgctctgtccccgctccccacaaggctccctctgattgggagctcccccgcagcgttctgagcacccatgatgtcaaggccatgtgccggtcactctgctgctcctcagccccaggctggctgagccctgtgcctgcccttcatcttcttccagagctgagcctgtggtcagggtggcagggtgggtgacagggaagttctgcttcctgcctgcacctggctacccttccctcttgtgctgcagaagaggcctggctcccatacagcagaccaagcttcctgtcccggggccagggcaccagcacatgttccacggccggcagcaactcttccaggggctccagcagctctaggggctcccggggccctggccggagccggagtcg

SEQ ID NO: 13783 - DNA, 920 bp, Homo sapiens
ggagccaagggaggcaaagtgaagcttctggggaaacctgtgcagatgccctctctgaactggccagaagccctgcccccacctcctccttcttgtgaactgagctgcctagaagggccggaggaggagctggagggcagctcagagccagaggagtggtgcccgccaatgcctgagagaagtcacctgacggagcccagctccagtggagggtgcctggtcaccccatcccgaagggaaaccccctctcccacaccttcctatggacagcagtccacagccactcttacaccctcacctcctgaccctccccagcccccaactgacatgccccatctccatcagatgcccaggagggtgccccttgggccgagttcccctctcagtgtatcccagcccatgctgggcatccgtgaagcgaggcctgctggcttgggtgctggccctgcagcctcaccccacctcagccccagtcctgcccctagcacagccagcagtgccccaggcagaacctggcaggggaatggggagatgactcccccacttcaaggaccccgtgctcgattccggaagaaacccaaggctcttccctacaggagggagaacagtcctggggacttgcccccaccacccttgccaccgccagaggaagaggcgagctgggccctagagctgagggcagcaggcagcatgtcctccctggagcgggagcgcagtggggagaggaaagcggtccaggccgtgcccctggcagcccagcgggtgctccacccagatgaagaggcctggctcccatacagcagaccaagcttcctgtcccggggccagggcaccagcacatgttccacggccggcagcaactcttccaggggctccagcagctctaggggctcccggggccctggccggagccggagtcg

SEQ ID NO: 13784 - DNA, 4981 bp, Homo sapiens
ggatccgggagggagccaggcggcccatggggaggggcaggggcttagccgctggcgagtgaggaccgggtcgggagaaaggggtcgcacctggagttcagcctcttgggtaggggcgggatacgtggggcgactcgaggagctgccaggactagggagggctgcgggccaagacggggcgggatctggatgacgtttgcctctaagacgccacgaggaggccaggctttgcaaccatctccataaagaaggggcaagttcgaggacggaaagcccactcaaagggcggggggcggggcctggcaagagggggtgtggccaggatcccaggcagtaaattgtgcggcggggtctggatggaaaggcggggcccgctgaaagaaggcgatccgagttctgctacttcctagtaagggacgtctctggagagattctgaggtgtttgaggtcagtggttttcaatcttggttggctacacataggaatcacttgaggggcttgagaaaaataccgacacctgagtcccacccccgagaaattctgatgaaatgggtccagggtgcagcctgagtggtggaactgggaccggggcctaggcgtggacaagtataggggtatttctgacccttctcctcatttcacctcttctttctcccacgggttcctttctggaagcctcttttgcctacacaccggcaggtaagccatctctgccccagtggggttcagaccccccgggacgggcccttctctcactcattcgccccctcattttccccagtgtccttcccgcactcagagggcctctctggagccagttccaggtaattctcttagcccatttcctcaggatgacctccaccgacaggccactcttcttccgccccgctgacgccccaggtggagggagcatggccacctcccaccccaacaccaccgccactgtcctgaaactcccgaatatcgccacctccctttcctttgctggcctcttcaggctctccgtccccaacgctcacctgctctccctcaggccacccatgggccttggccccgccccctactcatggctggcagattcgtggccccacccatctcgaagcccctcggcccaggaacccaggggaagctgctgccctagcaatcctgacccggacgacagatattacaacggtgaggagttctcattccctcacctggcttcagcgcacttctcccgacctactggggcaaaccgaagggcgcccgggagcccggtctctctgaggttggtcagtccctggggaggatgtgagctggggaagcctctcagacctacctccaccctggtttaggatgtaaggcttgtgtgggggaagaagttgatcccgtgggatttccctttgtcttccattctgttgtcctctatgtttctgtctctgcttccgggcctccctctttcttctctgcagaagcgggaatctccctgtatctagctcagacggccaggggcacggccgcccctggcgagggtcctgtctatagcaccattgacccagcgggggaggagctgcagaccttccatgggggcttcccccaacatccctcaggagatctgggtccctggagccagtacgctcctccagagtggagccagggggacagtggtatgactccaactcctgaaaccccgtttagccctgaccagggtatccccaaagaggatcctcctccctgaccctctggcacctagcccggcacttccttctgacctgtctcatctctggctctttcctgcctgttctccgggtgtccccatcctattctcctcaggagccaagggaggcaaagtgaagcttctggggaaacctgtgcagatgccctctctgaactggccagaagccctgcccccacctcctccttcttgtgaactgagctgcctagaagggccggaggaggagctggagggcaggtagagatgctccctgcttccaggcccacacacctgcggccagaccatgggctgctggggaggaaggggagggggcagcaggaaggccaacgggaaggtatggaagcagctgagccctttccttctctcctgcctctttgatcccagctcagagccagaggagtggtgcccgccaatgcctgagagaagtcacctgacggagcccagctccagtggagggtgcctggtcaccccatcccgaagggaaaccccctctcccacaccttcctatggacagcagtccacagccactcttacaccctcacctcctgaccctccccagcccccaactgacatgccccatctccatcagatgcccaggtagggaggtatatagtacctcactcattgcaagccctctatacgtatctactcagtagatgactgggtgggtggatggatggatgggtggatggatctggggtacagaggtctcagggctgtgtcagggtggaagtgtaatttgggcaggaatatggaggctgacaagatctctcatgcccattagactggctcttgctggagtggtcagcactctacctgagacatttcagatatggctctccttatgcttctctagcttgggaggacttacgggcggacgggttgtgtctcgtttatctgttaggttgattgtctagcacagtgccaggcacatagtaggcattcagtttttgtggagggaacagaggctgcggcctcctgtcattgcaggagggtgccccttgggccgagttcccctctcagtgtatcccagcccatgctgggcatccgtgaagcgaggcctgctggcttgggtgctggccctgcagcctcaccccacctcagccccagtcctgcccctagcacagccagcagtgccccaggtaagtctctacaacctccttttgccccccggctccctccagtgcttgcttccccttcacccttaggcctttttcctgatttttgcccttacccattcctcttcccgtctcctaacactgcaggcagaacctggcaggggaatggggagatgactcccccacttcaaggaccccgtgctcgattccggaagaaacccaaggctcttccctacaggagggagaacagtcctgggggtgaggggggatgcacctgggagatggtgacagtagtggcggggggataggcaggaaaccaagggtgcactctgggggctggaggagggaacaggtgaaccccaatcttgggctgttcattggcagcctcctggtgccagggaatgcaggtgagagaaagattagtgacaggagtggcaggaggctccgctgaaaacagctccctccccagacttgcccccaccacccttgccaccgccagaggaagaggcgagctgggccctagagctgagggcagcaggcagcatgtcctccctggagcgggagcgcagtggggagaggaaagcggtccaggccgtgcccctggcagcccagcgggtgctccacccagatggtaagcagggccagggcaggcaggagggctgctgccacaggagactgtgggctttgggactgggggctgatagtagaccagctcagccctccctttagttaggttcatgcatttgatccacatcaaactcccctgtctctctaactctctgagcacaatcccctgaagtcccaagttgtgttcattcccaggatggaagcccagataagaggactgggctctaggtgctctgtccccgctccccacaaggctccctctgattgggagctcccccgcagcgttctgagcacccatgatgtcaaggccatgtgccggtcactctgctgctcctcagccccaggctggctgagccctgtgcctgcccttcatcttcttccagagctgagcctgtggtcagggtggcagggtgggtgacagggaagttctgcttcctgcctgcacctggctacccttccctcttgtgctgcagaagaggcctggctcccatacagcagaccaagcttcctgtcccggggccagggcaccagcacatgttccacggccggcagcaactcttccaggggctccagcagctctaggggctcccggggccctggccggagccggagtcggagtcagagccggagccagagccaaaggccaggacagaaacgccgagaggtaggggccatagattgcagaaaaatgagggcagaggactagggaagggtggaccaaggcgtaatggaaaacaggaaggtgggcaagggcttgtggaggagtgtcaaaaggaggggatcgagagggtgagggggagggaggaatcctgtagaagtgacaaggggactgagcgtggtggctcatgcctgtaatcccagcactttgggagaccgagatgggcggatcccttgagctcaggagtttgagactagcctgggcaatatggtaaaatcccatctctacaaaaaatacaaaattagctgggcgtggtggtatgctcctgtagtcccagctactcagggggcttgaggtgggaggatagcttgagcctgggaggtcaaggctgcagtgagccatgatcacaccactgctctccagtctgggcgacagagtgagactctgtctcaaacaaacaaacagacaaacaaaacaaaagaaatgacaaggggtgaggacaagatgacacataatagaggagcctgggctcaccgtaggagaactgggttaggagagagaaagcctgagcccttcctggacttgtttgccctgggccagggttttacaaaacagcatctctctctctctccctaggaaccaagatgacccttgttggggcattgagaatatcatgagtgccacggggaaggggagtagggatgtcttttcccccccagcagtgatgagtggggctagctgaagcccattggtttccacgatttcaattggctgagaaggcagagagctagctcctccctttctttctttttccacctgagacttgtttataaaaaacaaaacaataaaaagagtctgatcaga

SEQ ID NO: 13785 - DNA, 2139 bp, Homo sapiens
ggatccgggagggagccaggcggcccatggggaggggcaggggcttagccgctggcgagtgaggaccgggtcgggagaaaggggtcgcacctggagttcagcctcttgggtaggggcgggatacgtggggcgactcgaggagctgccaggactagggagggctgcgggccaagacggggcgggatctggatgacgtttgcctctaagacgccacgaggaggccaggctttgcaaccatctccataaagaaggggcaagttcgaggacggaaagcccactcaaagggcggggggcggggcctggcaagagggggtgtggccaggatcccaggcagtaaattgtgcggcggggtctggatggaaaggcggggcccgctgaaagaaggcgatccgagttctgctacttcctagtaagggacgtctctggagagattctgaggtgtttgagcctcttttgcctacacaccggcagtgtccttcccgcactcagagggcctctctggagccagttccaggccacccatgggccttggccccgccccctactcatggctggcagattcgtggccccacccatctcgaagcccctcggcccaggaacccaggggaagctgctgccctagcaatcctgacccggacgacagatattacaacggtgaggagttctcattccctcacctggcttcagcgcacttctcccgacctactggggcaaaccgaagggcgcccgggagcccggtctctctgagaagcgggaatctccctgtatctagctcagacggccaggggcacggccgcccctggcgagggtcctgtctatagcaccattgacccagcgggggaggagctgcagaccttccatgggggcttcccccaacatccctcaggagatctgggtccctggagccagtacgctcctccagagtggagccagggggacagtggagccaagggaggcaaagtgaagcttctggggaaacctgtgcagatgccctctctgaactggccagaagccctgcccccacctcctccttcttgtgaactgagctgcctagaagggccggaggaggagctggagggcagctcagagccagaggagtggtgcccgccaatgcctgagagaagtcacctgacggagcccagctccagtggagggtgcctggtcaccccatcccgaagggaaaccccctctcccacaccttcctatggacagcagtccacagccactcttacaccctcacctcctgaccctccccagcccccaactgacatgccccatctccatcagatgcccaggagggtgccccttgggccgagttcccctctcagtgtatcccagcccatgctgggcatccgtgaagcgaggcctgctggcttgggtgctggccctgcagcctcaccccacctcagccccagtcctgcccctagcacagccagcagtgccccaggcagaacctggcaggggaatggggagatgactcccccacttcaaggaccccgtgctcgattccggaagaaacccaaggctcttccctacaggagggagaacagtcctggggacttgcccccaccacccttgccaccgccagaggaagaggcgagctgggccctagagctgagggcagcaggcagcatgtcctccctggagcgggagcgcagtggggagaggaaagcggtccaggccgtgcccctggcagcccagcgggtgctccacccagatgaagaggcctggctcccatacagcagaccaagcttcctgtcccggggccagggcaccagcacatgttccacggccggcagcaactcttccaggggctccagcagctctaggggctcccggggccctggccggagccggagtcggagtcagagccggagccagagccaaaggccaggacagaaacgccgagaggaaccaagatgacccttgttggggcattgagaatatcatgagtgccacggggaaggggagtagggatgtcttttcccccccagcagtgatgagtggggctagctgaagcccattggtttccacgatttcaattggctgagaaggcagagagctagctcctccctttctttctttttccacctgagacttgtttataaaaaacaaaacaataaaaagagtctgatcaga

SEQ ID NO: 13786 - DNA, 4624 bp, Homo sapiens
atggaaaggcggggcccgctgaaagaaggcgatccgagttctgctacttcctagtaagggacgtctctggagagattctgaggtgtttgaggtcagtggttttcaatcttggttggctacacataggaatcacttgaggggcttgagaaaaataccgacacctgagtcccacccccgagaaattctgatgaaatgggtccagggtgcagcctgagtggtggaactgggaccggggcctaggcgtggacaagtataggggtatttctgacccttctcctcatttcacctcttctttctcccacgggttcctttctggaagcctcttttgcctacacaccggcaggtaagccatctctgccccagtggggttcagaccccccgggacgggcccttctctcactcattcgccccctcattttccccagtgtccttcccgcactcagagggcctctctggagccagttccaggtaattctcttagcccatttcctcaggatgacctccaccgacaggccactcttcttccgccccgctgacgccccaggtggagggagcatggccacctcccaccccaacaccaccgccactgtcctgaaactcccgaatatcgccacctccctttcctttgctggcctcttcaggctctccgtccccaacgctcacctgctctccctcaggccacccatgggccttggccccgccccctactcatggctggcagattcgtggccccacccatctcgaagcccctcggcccaggaacccaggggaagctgctgccctagcaatcctgacccggacgacagatattacaacggtgaggagttctcattccctcacctggcttcagcgcacttctcccgacctactggggcaaaccgaagggcgcccgggagcccggtctctctgaggttggtcagtccctggggaggatgtgagctggggaagcctctcagacctacctccaccctggtttaggatgtaaggcttgtgtgggggaagaagttgatcccgtgggatttccctttgtcttccattctgttgtcctctatgtttctgtctctgcttccgggcctccctctttcttctctgcagaagcgggaatctccctgtatctagctcagacggccaggggcacggccgcccctggcgagggtcctgtctatagcaccattgacccagcgggggaggagctgcagaccttccatgggggcttcccccaacatccctcaggagatctgggtccctggagccagtacgctcctccagagtggagccagggggacagtggtatgactccaactcctgaaaccccgtttagccctgaccagggtatccccaaagaggatcctcctccctgaccctctggcacctagcccggcacttccttctgacctgtctcatctctggctctttcctgcctgttctccgggtgtccccatcctattctcctcaggagccaagggaggcaaagtgaagcttctggggaaacctgtgcagatgccctctctgaactggccagaagccctgcccccacctcctccttcttgtgaactgagctgcctagaagggccggaggaggagctggagggcaggtagagatgctccctgcttccaggcccacacacctgcggccagaccatgggctgctggggaggaaggggagggggcagcaggaaggccaacgggaaggtatggaagcagctgagccctttccttctctcctgcctctttgatcccagctcagagccagaggagtggtgcccgccaatgcctgagagaagtcacctgacggagcccagctccagtggagggtgcctggtcaccccatcccgaagggaaaccccctctcccacaccttcctatggacagcagtccacagccactcttacaccctcacctcctgaccctccccagcccccaactgacatgccccatctccatcagatgcccaggtagggaggtatatagtacctcactcattgcaagccctctatacgtatctactcagtagatgactgggtgggtggatggatggatgggtggatggatctggggtacagaggtctcagggctgtgtcagggtggaagtgtaatttgggcaggaatatggaggctgacaagatctctcatgcccattagactggctcttgctggagtggtcagcactctacctgagacatttcagatatggctctccttatgcttctctagcttgggaggacttacgggcggacgggttgtgtctcgtttatctgttaggttgattgtctagcacagtgccaggcacatagtaggcattcagtttttgtggagggaacagaggctgcggcctcctgtcattgcaggagggtgccccttgggccgagttcccctctcagtgtatcccagcccatgctgggcatccgtgaagcgaggcctgctggcttgggtgctggccctgcagcctcaccccacctcagccccagtcctgcccctagcacagccagcagtgccccaggtaagtctctacaacctccttttgccccccggctccctccagtgcttgcttccccttcacccttaggcctttttcctgatttttgcccttacccattcctcttcccgtctcctaacactgcaggcagaacctggcaggggaatggggagatgactcccccacttcaaggaccccgtgctcgattccggaagaaacccaaggctcttccctacaggagggagaacagtcctgggggtgaggggggatgcacctgggagatggtgacagtagtggcggggggataggcaggaaaccaagggtgcactctgggggctggaggagggaacaggtgaaccccaatcttgggctgttcattggcagcctcctggtgccagggaatgcaggtgagagaaagattagtgacaggagtggcaggaggctccgctgaaaacagctccctccccagacttgcccccaccacccttgccaccgccagaggaagaggcgagctgggccctagagctgagggcagcaggcagcatgtcctccctggagcgggagcgcagtggggagaggaaagcggtccaggccgtgcccctggcagcccagcgggtgctccacccagatggtaagcagggccagggcaggcaggagggctgctgccacaggagactgtgggctttgggactgggggctgatagtagaccagctcagccctccctttagttaggttcatgcatttgatccacatcaaactcccctgtctctctaactctctgagcacaatcccctgaagtcccaagttgtgttcattcccaggatggaagcccagataagaggactgggctctaggtgctctgtccccgctccccacaaggctccctctgattgggagctcccccgcagcgttctgagcacccatgatgtcaaggccatgtgccggtcactctgctgctcctcagccccaggctggctgagccctgtgcctgcccttcatcttcttccagagctgagcctgtggtcagggtggcagggtgggtgacagggaagttctgcttcctgcctgcacctggctacccttccctcttgtgctgcagaagaggcctggctcccatacagcagaccaagcttcctgtcccggggccagggcaccagcacatgttccacggccggcagcaactcttccaggggctccagcagctctaggggctcccggggccctggccggagccggagtcggagtcagagccggagccagagccaaaggccaggacagaaacgccgagaggtaggggccatagattgcagaaaaatgagggcagaggactagggaagggtggaccaaggcgtaatggaaaacaggaaggtgggcaagggcttgtggaggagtgtcaaaaggaggggatcgagagggtgagggggagggaggaatcctgtagaagtgacaaggggactgagcgtggtggctcatgcctgtaatcccagcactttgggagaccgagatgggcggatcccttgagctcaggagtttgagactagcctgggcaatatggtaaaatcccatctctacaaaaaatacaaaattagctgggcgtggtggtatgctcctgtagtcccagctactcagggggcttgaggtgggaggatagcttgagcctgggaggtcaaggctgcagtgagccatgatcacaccactgctctccagtctgggcgacagagtgagactctgtctcaaacaaacaaacagacaaacaaaacaaaagaaatgacaaggggtgaggacaagatgacacataatagaggagcctgggctcaccgtaggagaactgggttaggagagagaaagcctgagcccttcctggacttgtttgccctgggccagggttttacaaaacagcatctctctctctctccctaggaaccaagatgacccttgttggggcattgagaatatcatgagtgccacggggaaggggagtagggatgtcttttcccccccagcagtgatgagtggggctagctgaagcccattggtttccacgatttcaattggctgagaaggcagagagctagctcctccctttctttctttttccacctgagacttgtttataaaaaacaaaacaataaaaagagtctgatcag

SEQ ID NO: 13787 - DNA, 1645 bp, Homo sapiens
atggaaaggcggggcccgctgaaagaaggcgatccgagttctgctacttcctagtaagggacgtctctggagagattctgaggtgtttgagcctcttttgcctacacaccggcaggccacccatgggccttggccccgccccctactcatggctggcagattcgtggccccacccatctcgaagcccctcggcccaggaacccaggggaagctgctgccctagcaatcctgacccggacgacagatattacaacgaagcgggaatctccctgtatctagctcagacggccaggggcacggccgcccctggcgagggtcctgtctatagcaccattgacccagcgggggaggagctgcagaccttccatgggggcttcccccaacatccctcaggagatctgggtccctggagccagtacgctcctccagagtggagccagggggacagtggagccaagggaggcaaagtgaagcttctggggaaacctgtgcagatgccctctctgaactggccagaagccctgcccccacctcctccttcttgtgaactgagctgcctagaagggccggaggaggagctggagggcagctcagagccagaggagtggtgcccgccaatgcctgagagaagtcacctgacggagcccagctccagtggagggtgcctggtcaccccatcccgaagggaaaccccctctcccacaccttcctatggacagcagtccacagccactcttacaccctcacctcctgaccctccccagcccccaactgacatgccccatctccatcagatgcccaggagggtgccccttgggccgagttcccctctcagtgtatcccagcccatgctgggcatccgtgaagcgaggcctgctggcttgggtgctggccctgcagcctcaccccacctcagccccagtcctgcccctagcacagccagcagtgccccaggcagaacctggcaggggaatggggagatgactcccccacttcaaggaccccgtgctcgattccggaagaaacccaaggctcttccctacaggagggagaacagtcctggggacttgcccccaccacccttgccaccgccagaggaagaggcgagctgggccctagagctgagggcagcaggcagcatgtcctccctggagcgggagcgcagtggggagaggaaagcggtccaggccgtgcccctggcagcccagcgggtgctccacccagatgaagaggcctggctcccatacagcagaccaagcttcctgtcccggggccagggcaccagcacatgttccacggccggcagcaactcttccaggggctccagcagctctaggggctcccggggccctggccggagccggagtcggagtcagagccggagccagagccaaaggccaggacagaaacgccgagaggaaccaagatgacccttgttggggcattgagaatatcatgagtgccacggggaaggggagtagggatgtcttttcccccccagcagtgatgagtggggctagctgaagcccattggtttccacgatttcaattggctgagaaggcagagagctagctcctccctttctttctttttccacctgagacttgtttataaaaaacaaaacaataaaaagagtctgatcag

SEQ ID NO: 13788 - DNA, 1888 bp, Homo sapiens
gtgcggcggggtctggatggaaaggcggggcccgctgaaagaaggcgatccgagttctgctacttcctagtaagggacgtctctggagagattctgaggtgtttgaggtcagtggttttcaatcttggttggctacacataggaatcacttgaggggcttgagaaaaataccgacacctgagtcccacccccgagaaattctgatgaaatgggtccagggtgcagcctgagtggtggaactgggaccggggcctaggcgtggacaagtataggggtatttctgacccttctcctcatttcacctcttctttctcccacgggttcctttctggaagcctcttttgcctacacaccggcaggtaagccatctctgccccagtggggttcagaccccccgggacgggcccttctctcactcattcgccccctcattttccccagtgtccttcccgcactcagagggcctctctggagccagttccaggtaattctcttagcccatttcctcaggatgacctccaccgacaggccactcttcttccgccccgctgacgccccaggtggagggagcatggccacctcccaccccaacaccaccgccactgtcctgaaactcccgaatatcgccacctccctttcctttgctggcctcttcaggctctccgtccccaacgctcacctgctctccctcaggccacccatgggccttggccccgccccctactcatggctggcagattcgtggccccacccatctcgaagcccctcggcccaggaacccaggggaagctgctgccctagcaatcctgacccggacgacagatattacaacggtgaggagttctcattccctcacctggcttcagcgcacttctcccgacctactggggcaaaccgaagggcgcccgggagcccggtctctctgaggttggtcagtccctggggaggatgtgagctggggaagcctctcagacctacctccaccctggtttaggatgtaaggcttgtgtgggggaagaagttgatcccgtgggatttccctttgtcttccattctgttgtcctctatgtttctgtctctgcttccgggcctccctctttcttctctgcagaagcgggaatctccctgtatctagctcagacggccaggggcacggccgcccctggcgagggtcctgtctatagcaccattgacccagcgggggaggagctgcagaccttccatgggggcttcccccaacatccctcaggagatctgggtccctggagccagtacgctcctccagagtggagccagggggacagtggtatgactccaactcctgaaaccccgtttagccctgaccagggtatccccaaagaggatcctcctccctgaccctctggcacctagcccggcacttccttctgacctgtctcatctctggctctttcctgcctgttctccgggtgtccccatcctattctcctcaggagccaagggaggcaaagtgaagcttctggggaaacctgtgcagatgccctctctgaactggccagaagccctgcccccacctcctccttcttgtgaactgagctgcctagaagggccggaggaggagctggagggcaggtagagatgctccctgcttccaggcccacacacctgcggccagaccatgggctgctggggaggaaggggagggggcagcaggaaggccaacgggaaggtatggaagcagctgagccctttccttctctcctgcctctttgatcccagctcagagccagaggagtggtgcccgccaatgcctgagagaagtcacctgacggagcccagctccagtggagggtgcctggtcaccccatcccgaagggaaaccccctctcccacaccttcctatggacag

SEQ ID NO: 13789 - DNA, 583 bp, Homo sapiens
gtgcggcggggtctggatggaaaggcggggcccgctgaaagaaggcgatccgagttctgctacttcctagtaagggacgtctctggagagattctgaggtgtttgagcctcttttgcctacacaccggcagtgtccttcccgcactcagagggcctctctggagccagttccaggccacccatgggccttggccccgccccctactcatggctggcagattcgtggccccacccatctcgaagcccctcggcccaggaacccaggggaagctgctgccctagcaatcctgacccggacgacagatattacaacggagccaagggaggcaaagtgaagcttctggggaaacctgtgcagatgccctctctgaactggccagaagccctgcccccacctcctccttcttgtgaactgagctgcctagaagggccggaggaggagctggagggcagctcagagccagaggagtggtgcccgccaatgcctgagagaagtcacctgacggagcccagctccagtggagggtgcctggtcaccccatcccgaagggaaaccccctctcccacaccttcctatggacag

SEQ ID NO: 13790 - DNA, 5350 bp, Homo sapiens
gctgcgtgagtccacccgagggcagtgctgaggatcttgacgggggcggggcaagccccccactggggtagctgtgcctgccgggtcgggaatgaccctttcccagttccagggtttcgggcccctcctcccctcacttctctgacccccacagcgtccccgccggacctggagcccgggctggaggtgggcgcggggctggcggtgcggctggcgagggtgctgcgggagcccgccttcctcgcgggcagcggcgcagcctgcggggcgctgcttctcgggctctgcgccgccctctactggcgccggaaacagcgcaaagagctcagccactacacgggtgagctcccggcctcggagcggacggatccgggagggagccaggcggcccatggggaggggcaggggcttagccgctggcgagtgaggaccgggtcgggagaaaggggtcgcacctggagttcagcctcttgggtaggggcgggatacgtggggcgactcgaggagctgccaggactagggagggctgcgggccaagacggggcgggatctggatgacgtttgcctctaagacgccacgaggaggccaggctttgcaaccatctccataaagaaggggcaagttcgaggacggaaagcccactcaaagggcggggggcggggcctggcaagagggggtgtggccaggatcccaggcagtaaattgtgcggcggggtctggatggaaaggcggggcccgctgaaagaaggcgatccgagttctgctacttcctagtaagggacgtctctggagagattctgaggtgtttgaggtcagtggttttcaatcttggttggctacacataggaatcacttgaggggcttgagaaaaataccgacacctgagtcccacccccgagaaattctgatgaaatgggtccagggtgcagcctgagtggtggaactgggaccggggcctaggcgtggacaagtataggggtatttctgacccttctcctcatttcacctcttctttctcccacgggttcctttctggaagcctcttttgcctacacaccggcaggtaagccatctctgccccagtggggttcagaccccccgggacgggcccttctctcactcattcgccccctcattttccccagtgtccttcccgcactcagagggcctctctggagccagttccaggtaattctcttagcccatttcctcaggatgacctccaccgacaggccactcttcttccgccccgctgacgccccaggtggagggagcatggccacctcccaccccaacaccaccgccactgtcctgaaactcccgaatatcgccacctccctttcctttgctggcctcttcaggctctccgtccccaacgctcacctgctctccctcaggccacccatgggccttggccccgccccctactcatggctggcagattcgtggccccacccatctcgaagcccctcggcccaggaacccaggggaagctgctgccctagcaatcctgacccggacgacagatattacaacggtgaggagttctcattccctcacctggcttcagcgcacttctcccgacctactggggcaaaccgaagggcgcccgggagcccggtctctctgaggttggtcagtccctggggaggatgtgagctggggaagcctctcagacctacctccaccctggtttaggatgtaaggcttgtgtgggggaagaagttgatcccgtgggatttccctttgtcttccattctgttgtcctctatgtttctgtctctgcttccgggcctccctctttcttctctgcagaagcgggaatctccctgtatctagctcagacggccaggggcacggccgcccctggcgagggtcctgtctatagcaccattgacccagcgggggaggagctgcagaccttccatgggggcttcccccaacatccctcaggagatctgggtccctggagccagtacgctcctccagagtggagccagggggacagtggtatgactccaactcctgaaaccccgtttagccctgaccagggtatccccaaagaggatcctcctccctgaccctctggcacctagcccggcacttccttctgacctgtctcatctctggctctttcctgcctgttctccgggtgtccccatcctattctcctcaggagccaagggaggcaaagtgaagcttctggggaaacctgtgcagatgccctctctgaactggccagaagccctgcccccacctcctccttcttgtgaactgagctgcctagaagggccggaggaggagctggagggcaggtagagatgctccctgcttccaggcccacacacctgcggccagaccatgggctgctggggaggaaggggagggggcagcaggaaggccaacgggaaggtatggaagcagctgagccctttccttctctcctgcctctttgatcccagctcagagccagaggagtggtgcccgccaatgcctgagagaagtcacctgacggagcccagctccagtggagggtgcctggtcaccccatcccgaagggaaaccccctctcccacaccttcctatggacagcagtccacagccactcttacaccctcacctcctgaccctccccagcccccaactgacatgccccatctccatcagatgcccaggtagggaggtatatagtacctcactcattgcaagccctctatacgtatctactcagtagatgactgggtgggtggatggatggatgggtggatggatctggggtacagaggtctcagggctgtgtcagggtggaagtgtaatttgggcaggaatatggaggctgacaagatctctcatgcccattagactggctcttgctggagtggtcagcactctacctgagacatttcagatatggctctccttatgcttctctagcttgggaggacttacgggcggacgggttgtgtctcgtttatctgttaggttgattgtctagcacagtgccaggcacatagtaggcattcagtttttgtggagggaacagaggctgcggcctcctgtcattgcaggagggtgccccttgggccgagttcccctctcagtgtatcccagcccatgctgggcatccgtgaagcgaggcctgctggcttgggtgctggccctgcagcctcaccccacctcagccccagtcctgcccctagcacagccagcagtgccccaggtaagtctctacaacctccttttgccccccggctccctccagtgcttgcttccccttcacccttaggcctttttcctgatttttgcccttacccattcctcttcccgtctcctaacactgcaggcagaacctggcaggggaatggggagatgactcccccacttcaaggaccccgtgctcgattccggaagaaacccaaggctcttccctacaggagggagaacagtcctgggggtgaggggggatgcacctgggagatggtgacagtagtggcggggggataggcaggaaaccaagggtgcactctgggggctggaggagggaacaggtgaaccccaatcttgggctgttcattggcagcctcctggtgccagggaatgcaggtgagagaaagattagtgacaggagtggcaggaggctccgctgaaaacagctccctccccagacttgcccccaccacccttgccaccgccagaggaagaggcgagctgggccctagagctgagggcagcaggcagcatgtcctccctggagcgggagcgcagtggggagaggaaagcggtccaggccgtgcccctggcagcccagcgggtgctccacccagatggtaagcagggccagggcaggcaggagggctgctgccacaggagactgtgggctttgggactgggggctgatagtagaccagctcagccctccctttagttaggttcatgcatttgatccacatcaaactcccctgtctctctaactctctgagcacaatcccctgaagtcccaagttgtgttcattcccaggatggaagcccagataagaggactgggctctaggtgctctgtccccgctccccacaaggctccctctgattgggagctcccccgcagcgttctgagcacccatgatgtcaaggccatgtgccggtcactctgctgctcctcagccccaggctggctgagccctgtgcctgcccttcatcttcttccagagctgagcctgtggtcagggtggcagggtgggtgacagggaagttctgcttcctgcctgcacctggctacccttccctcttgtgctgcagaagaggcctggctcccatacagcagaccaagcttcctgtcccggggccagggcaccagcacatgttccacggccggcagcaactcttccaggggctccagcagctctaggggctcccggggccctggccggagccggagtcggagtcagagccggagccagagccaaaggccaggacagaaacgccgagaggtaggggccatagattgcagaaaaatgagggcagaggactagggaagggtggaccaaggcgtaatggaaaacaggaaggtgggcaagggcttgtggaggagtgtcaaaaggaggggatcgagagggtgagggggagggaggaatcctgtagaagtgacaaggggactgagcgtggtggctcatgcctgtaatcccagcactttgggagaccgagatgggcggatcccttgagctcaggagtttgagactagcctgggcaatatggtaaaatcccatctctacaaaaaatacaaaattagctgggcgtggtggtatgctcctgtagtcccagctactcagggggcttgaggtgggaggatagcttgagcctgggaggtcaaggctgcagtgagccatgatcacaccactgctctccagtctgggcgacagagtgagactctgtctcaaacaaacaaacagacaaacaaaacaaaagaaatgacaaggggtgaggacaagatgacacataatagaggagcctgggctcaccgtaggagaactgggttaggagagagaaagcctgagcccttcctggacttgtttgccctgggccagggttttacaaaacagcatctctctctctctccctaggaaccaagatgacccttgttggggcattgagaatatcatgagtgccacggggaaggggagtagggatgtcttttcccccccagcagtgatgagtggggctagctgaagcccattggtttccacgatttcaattggctgagaaggcagagagctagctcctccctttctttctttttccacctgagacttgtttataaaaaacaaaacaataaaaagagtctgatcagagccc

SEQ ID NO: 13791 - DNA, 1942 bp, Homo sapiens
gctgcgtgagtccacccgagggcagtgctgaggatcttgacgggggcggggcaagccccccactggggtagctgtgcctgccgggtcgggaatgaccctttcccagttccagggtttcgggcccctcctcccctcacttctctgacccccacagcgtccccgccggacctggagcccgggctggaggtgggcgcggggctggcggtgcggctggcgagggtgctgcgggagcccgccttcctcgcgggcagcggcgcagcctgcggggcgctgcttctcgggctctgcgccgccctctactggcgccggaaacagcgcaaagagctcagccactacacggcctcttttgcctacacaccggcagtgtccttcccgcactcagagggcctctctggagccagttccaggccacccatgggccttggccccgccccctactcatggctggcagattcgtggccccacccatctcgaagcccctcggcccaggaacccaggggaagctgctgccctagcaatcctgacccggacgacagatattacaacgaagcgggaatctccctgtatctagctcagacggccaggggcacggccgcccctggcgagggtcctgtctatagcaccattgacccagcgggggaggagctgcagaccttccatgggggcttcccccaacatccctcaggagatctgggtccctggagccagtacgctcctccagagtggagccagggggacagtggagccaagggaggcaaagtgaagcttctggggaaacctgtgcagatgccctctctgaactggccagaagccctgcccccacctcctccttcttgtgaactgagctgcctagaagggccggaggaggagctggagggcagctcagagccagaggagtggtgcccgccaatgcctgagagaagtcacctgacggagcccagctccagtggagggtgcctggtcaccccatcccgaagggaaaccccctctcccacaccttcctatggacagcagtccacagccactcttacaccctcacctcctgaccctccccagcccccaactgacatgccccatctccatcagatgcccaggagggtgccccttgggccgagttcccctctcagtgtatcccagcccatgctgggcatccgtgaagcgaggcctgctggcttgggtgctggccctgcagcctcaccccacctcagccccagtcctgcccctagcacagccagcagtgccccaggcagaacctggcaggggaatggggagatgactcccccacttcaaggaccccgtgctcgattccggaagaaacccaaggctcttccctacaggagggagaacagtcctggggacttgcccccaccacccttgccaccgccagaggaagaggcgagctgggccctagagctgagggcagcaggcagcatgtcctccctggagcgggagcgcagtggggagaggaaagcggtccaggccgtgcccctggcagcccagcgggtgctccacccagatgaagaggcctggctcccatacagcagaccaagcttcctgtcccggggccagggcaccagcacatgttccacggccggcagcaactcttccaggggctccagcagctctaggggctcccggggccctggccggagccggagtcggagtcagagccggagccagagccaaaggccaggacagaaacgccgagaggaaccaagatgacccttgttggggcattgagaatatcatgagtgccacggggaaggggagtagggatgtcttttcccccccagcagtgatgagtggggctagctgaagcccattggtttccacgatttcaattggctgagaaggcagagagctagctcctccctttctttctttttccacctgagacttgtttataaaaaacaaaacaataaaaagagtctgatcagagccc

SEQ ID NO: 13792 - DNA, 5001 bp, Homo sapiens
ctcccggcctcggagcggacggatccgggagggagccaggcggcccatggggaggggcaggggcttagccgctggcgagtgaggaccgggtcgggagaaaggggtcgcacctggagttcagcctcttgggtaggggcgggatacgtggggcgactcgaggagctgccaggactagggagggctgcgggccaagacggggcgggatctggatgacgtttgcctctaagacgccacgaggaggccaggctttgcaaccatctccataaagaaggggcaagttcgaggacggaaagcccactcaaagggcggggggcggggcctggcaagagggggtgtggccaggatcccaggcagtaaattgtgcggcggggtctggatggaaaggcggggcccgctgaaagaaggcgatccgagttctgctacttcctagtaagggacgtctctggagagattctgaggtgtttgaggtcagtggttttcaatcttggttggctacacataggaatcacttgaggggcttgagaaaaataccgacacctgagtcccacccccgagaaattctgatgaaatgggtccagggtgcagcctgagtggtggaactgggaccggggcctaggcgtggacaagtataggggtatttctgacccttctcctcatttcacctcttctttctcccacgggttcctttctggaagcctcttttgcctacacaccggcaggtaagccatctctgccccagtggggttcagaccccccgggacgggcccttctctcactcattcgccccctcattttccccagtgtccttcccgcactcagagggcctctctggagccagttccaggtaattctcttagcccatttcctcaggatgacctccaccgacaggccactcttcttccgccccgctgacgccccaggtggagggagcatggccacctcccaccccaacaccaccgccactgtcctgaaactcccgaatatcgccacctccctttcctttgctggcctcttcaggctctccgtccccaacgctcacctgctctccctcaggccacccatgggccttggccccgccccctactcatggctggcagattcgtggccccacccatctcgaagcccctcggcccaggaacccaggggaagctgctgccctagcaatcctgacccggacgacagatattacaacggtgaggagttctcattccctcacctggcttcagcgcacttctcccgacctactggggcaaaccgaagggcgcccgggagcccggtctctctgaggttggtcagtccctggggaggatgtgagctggggaagcctctcagacctacctccaccctggtttaggatgtaaggcttgtgtgggggaagaagttgatcccgtgggatttccctttgtcttccattctgttgtcctctatgtttctgtctctgcttccgggcctccctctttcttctctgcagaagcgggaatctccctgtatctagctcagacggccaggggcacggccgcccctggcgagggtcctgtctatagcaccattgacccagcgggggaggagctgcagaccttccatgggggcttcccccaacatccctcaggagatctgggtccctggagccagtacgctcctccagagtggagccagggggacagtggtatgactccaactcctgaaaccccgtttagccctgaccagggtatccccaaagaggatcctcctccctgaccctctggcacctagcccggcacttccttctgacctgtctcatctctggctctttcctgcctgttctccgggtgtccccatcctattctcctcaggagccaagggaggcaaagtgaagcttctggggaaacctgtgcagatgccctctctgaactggccagaagccctgcccccacctcctccttcttgtgaactgagctgcctagaagggccggaggaggagctggagggcaggtagagatgctccctgcttccaggcccacacacctgcggccagaccatgggctgctggggaggaaggggagggggcagcaggaaggccaacgggaaggtatggaagcagctgagccctttccttctctcctgcctctttgatcccagctcagagccagaggagtggtgcccgccaatgcctgagagaagtcacctgacggagcccagctccagtggagggtgcctggtcaccccatcccgaagggaaaccccctctcccacaccttcctatggacagcagtccacagccactcttacaccctcacctcctgaccctccccagcccccaactgacatgccccatctccatcagatgcccaggtagggaggtatatagtacctcactcattgcaagccctctatacgtatctactcagtagatgactgggtgggtggatggatggatgggtggatggatctggggtacagaggtctcagggctgtgtcagggtggaagtgtaatttgggcaggaatatggaggctgacaagatctctcatgcccattagactggctcttgctggagtggtcagcactctacctgagacatttcagatatggctctccttatgcttctctagcttgggaggacttacgggcggacgggttgtgtctcgtttatctgttaggttgattgtctagcacagtgccaggcacatagtaggcattcagtttttgtggagggaacagaggctgcggcctcctgtcattgcaggagggtgccccttgggccgagttcccctctcagtgtatcccagcccatgctgggcatccgtgaagcgaggcctgctggcttgggtgctggccctgcagcctcaccccacctcagccccagtcctgcccctagcacagccagcagtgccccaggtaagtctctacaacctccttttgccccccggctccctccagtgcttgcttccccttcacccttaggcctttttcctgatttttgcccttacccattcctcttcccgtctcctaacactgcaggcagaacctggcaggggaatggggagatgactcccccacttcaaggaccccgtgctcgattccggaagaaacccaaggctcttccctacaggagggagaacagtcctgggggtgaggggggatgcacctgggagatggtgacagtagtggcggggggataggcaggaaaccaagggtgcactctgggggctggaggagggaacaggtgaaccccaatcttgggctgttcattggcagcctcctggtgccagggaatgcaggtgagagaaagattagtgacaggagtggcaggaggctccgctgaaaacagctccctccccagacttgcccccaccacccttgccaccgccagaggaagaggcgagctgggccctagagctgagggcagcaggcagcatgtcctccctggagcgggagcgcagtggggagaggaaagcggtccaggccgtgcccctggcagcccagcgggtgctccacccagatggtaagcagggccagggcaggcaggagggctgctgccacaggagactgtgggctttgggactgggggctgatagtagaccagctcagccctccctttagttaggttcatgcatttgatccacatcaaactcccctgtctctctaactctctgagcacaatcccctgaagtcccaagttgtgttcattcccaggatggaagcccagataagaggactgggctctaggtgctctgtccccgctccccacaaggctccctctgattgggagctcccccgcagcgttctgagcacccatgatgtcaaggccatgtgccggtcactctgctgctcctcagccccaggctggctgagccctgtgcctgcccttcatcttcttccagagctgagcctgtggtcagggtggcagggtgggtgacagggaagttctgcttcctgcctgcacctggctacccttccctcttgtgctgcagaagaggcctggctcccatacagcagaccaagcttcctgtcccggggccagggcaccagcacatgttccacggccggcagcaactcttccaggggctccagcagctctaggggctcccggggccctggccggagccggagtcggagtcagagccggagccagagccaaaggccaggacagaaacgccgagaggtaggggccatagattgcagaaaaatgagggcagaggactagggaagggtggaccaaggcgtaatggaaaacaggaaggtgggcaagggcttgtggaggagtgtcaaaaggaggggatcgagagggtgagggggagggaggaatcctgtagaagtgacaaggggactgagcgtggtggctcatgcctgtaatcccagcactttgggagaccgagatgggcggatcccttgagctcaggagtttgagactagcctgggcaatatggtaaaatcccatctctacaaaaaatacaaaattagctgggcgtggtggtatgctcctgtagtcccagctactcagggggcttgaggtgggaggatagcttgagcctgggaggtcaaggctgcagtgagccatgatcacaccactgctctccagtctgggcgacagagtgagactctgtctcaaacaaacaaacagacaaacaaaacaaaagaaatgacaaggggtgaggacaagatgacacataatagaggagcctgggctcaccgtaggagaactgggttaggagagagaaagcctgagcccttcctggacttgtttgccctgggccagggttttacaaaacagcatctctctctctctccctaggaaccaagatgacccttgttggggcattgagaatatcatgagtgccacggggaaggggagtagggatgtcttttcccccccagcagtgatgagtggggctagctgaagcccattggtttccacgatttcaattggctgagaaggcagagagctagctcctccctttctttctttttccacctgagacttgtttataaaaaacaaaacaataaaaagagtctgatcaga

SEQ ID NO: 13793 - DNA, 3255 bp, Homo sapiens
ctcccggcctcggagcggacggatccgggagggagccaggcggcccatggggaggggcaggggcttagccgctggcgagtgaggaccgggtcgggagaaaggggtcgcacctggagttcagcctcttgggtaggggcgggatacgtggggcgactcgaggagctgccaggactagggagggctgcgggccaagacggggcgggatctggatgacgtttgcctctaagacgccacgaggaggccaggctttgcaaccatctccataaagaaggggcaagttcgaggacggaaagcccactcaaagggcggggggcggggcctggcaagagggggtgtggccaggatcccaggcagtaaattgtgcggcggggtctggatggaaaggcggggcccgctgaaagaaggcgatccgagttctgctacttcctagtaagggacgtctctggagagattctgaggtgtttgaggtcagtggttttcaatcttggttggctacacataggaatcacttgaggggcttgagaaaaataccgacacctgagtcccacccccgagaaattctgatgaaatgggtccagggtgcagcctgagtggtggaactgggaccggggcctaggcgtggacaagtataggggtatttctgacccttctcctcatttcacctcttctttctcccacgggttcctttctggaagcctcttttgcctacacaccggcaggtaagccatctctgccccagtggggttcagaccccccgggacgggcccttctctcactcattcgccccctcattttccccagtgtccttcccgcactcagagggcctctctggagccagttccaggtaattctcttagcccatttcctcaggatgacctccaccgacaggccactcttcttccgccccgctgacgccccaggtggagggagcatggccacctcccaccccaacaccaccgccactgtcctgaaactcccgaatatcgccacctccctttcctttgctggcctcttcaggctctccgtccccaacgctcacctgctctccctcaggccacccatgggccttggccccgccccctactcatggctggcagattcgtggccccacccatctcgaagcccctcggcccaggaacccaggggaagctgctgccctagcaatcctgacccggacgacagatattacaacggtgaggagttctcattccctcacctggcttcagcgcacttctcccgacctactggggcaaaccgaagggcgcccgggagcccggtctctctgaggttggtcagtccctggggaggatgtgagctggggaagcctctcagacctacctccaccctggtttaggatgtaaggcttgtgtgggggaagaagttgatcccgtgggatttccctttgtcttccattctgttgtcctctatgtttctgtctctgcttccgggcctccctctttcttctctgcagaagcgggaatctccctgtatctagctcagacggccaggggcacggccgcccctggcgagggtcctgtctatagcaccattgacccagcgggggaggagctgcagaccttccatgggggcttcccccaacatccctcaggagatctgggtccctggagccagtacgctcctccagagtggagccagggggacagtggagccaagggaggcaaagtgaagcttctggggaaacctgtgcagatgccctctctgaactggccagaagccctgcccccacctcctccttcttgtgaactgagctgcctagaagggccggaggaggagctggagggcagctcagagccagaggagtggtgcccgccaatgcctgagagaagtcacctgacggagcccagctccagtggagggtgcctggtcaccccatcccgaagggaaaccccctctcccacaccttcctatggacagcagtccacagccactcttacaccctcacctcctgaccctccccagcccccaactgacatgccccatctccatcagatgcccaggtagggaggtatatagtacctcactcattgcaagccctctatacgtatctactcagtagatgactgggtgggtggatggatggatgggtggatggatctggggtacagaggtctcagggctgtgtcagggtggaagtgtaatttgggcaggaatatggaggctgacaagatctctcatgcccattagactggctcttgctggagtggtcagcactctacctgagacatttcagatatggctctccttatgcttctctagcttgggaggacttacgggcggacgggttgtgtctcgtttatctgttaggttgattgtctagcacagtgccaggcacatagtaggcattcagtttttgtggagggaacagaggctgcggcctcctgtcattgcaggagggtgccccttgggccgagttcccctctcagtgtatcccagcccatgctgggcatccgtgaagcgaggcctgctggcttgggtgctggccctgcagcctcaccccacctcagccccagtcctgcccctagcacagccagcagtgccccaggcagaacctggcaggggaatggggagatgactcccccacttcaaggaccccgtgctcgattccggaagaaacccaaggctcttccctacaggagggagaacagtcctggggacttgcccccaccacccttgccaccgccagaggaagaggcgagctgggccctagagctgagggcagcaggcagcatgtcctccctggagcgggagcgcagtggggagaggaaagcggtccaggccgtgcccctggcagcccagcgggtgctccacccagatgaagaggcctggctcccatacagcagaccaagcttcctgtcccggggccagggcaccagcacatgttccacggccggcagcaactcttccaggggctccagcagctctaggggctcccggggccctggccggagccggagtcggagtcagagccggagccagagccaaaggccaggacagaaacgccgagaggaaccaagatgacccttgttggggcattgagaatatcatgagtgccacggggaaggggagtagggatgtcttttcccccccagcagtgatgagtggggctagctgaagcccattggtttccacgatttcaattggctgagaaggcagagagctagctcctccctttctttctttttccacctgagacttgtttataaaaaacaaaacaataaaaagagtctgatcaga

SEQ ID NO: 13794 - DNA, 863 bp, Homo sapiens
aggcagtaaattgtgcggcggggtctggatggaaaggcggggcccgctgaaagaaggcgatccgagttctgctacttcctagtaagggacgtctctggagagattctgaggtgtttgaggtcagtggttttcaatcttggttggctacacataggaatcacttgaggggcttgagaaaaataccgacacctgagtcccacccccgagaaattctgatgaaatgggtccagggtgcagcctgagtggtggaactgggaccggggcctaggcgtggacaagtataggggtatttctgacccttctcctcatttcacctcttctttctcccacgggttcctttctggaagcctcttttgcctacacaccggcaggtaagccatctctgccccagtggggttcagaccccccgggacgggcccttctctcactcattcgccccctcattttccccagtgtccttcccgcactcagagggcctctctggagccagttccaggtaattctcttagcccatttcctcaggatgacctccaccgacaggccactcttcttccgccccgctgacgccccaggtggagggagcatggccacctcccaccccaacaccaccgccactgtcctgaaactcccgaatatcgccacctccctttcctttgctggcctcttcaggctctccgtccccaacgctcacctgctctccctcaggccacccatgggccttggccccgccccctactcatggctggcagattcgtggccccacccatctcgaagcccctcggcccaggaacccaggggaagctgctgccctagcaatcctgacccggacgacagatattacaacggtgaggagttctcattcc

SEQ ID NO: 13795 - DNA, 572 bp, Homo sapiens
aggcagtaaattgtgcggcggggtctggatggaaaggcggggcccgctgaaagaaggcgatccgagttctgctacttcctagtaagggacgtctctggagagattctgaggtgtttgaggtcagtggttttcaatcttggttggctacacataggaatcacttgaggggcttgagaaaaataccgacacctgagtcccacccccgagaaattctgatgaaatgggtccagggtgcagcctgagtggtggaactgggaccggggcctaggcgtggacaagtataggggtatttctgacccttctcctcatttcacctcttctttctcccacgggttcctttctggaagcctcttttgcctacacaccggcagtgtccttcccgcactcagagggcctctctggagccagttccaggccacccatgggccttggccccgccccctactcatggctggcagattcgtggccccacccatctcgaagcccctcggcccaggaacccaggggaagctgctgccctagcaatcctgacccggacgacagatattacaacggtgaggagttctcattcc

SEQ ID NO: 13796 - DNA, 2610 bp, Homo sapiens
acgaggaggccaggctttgcaaccatctccataaagaaggggcaagttcgaggacggaaagcccactcaaagggcggggggcggggcctggcaagagggggtgtggccaggatcccaggcagtaaattgtgcggcggggtctggatggaaaggcggggcccgctgaaagaaggcgatccgagttctgctacttcctagtaagggacgtctctggagagattctgaggtgtttgaggtcagtggttttcaatcttggttggctacacataggaatcacttgaggggcttgagaaaaataccgacacctgagtcccacccccgagaaattctgatgaaatgggtccagggtgcagcctgagtggtggaactgggaccggggcctaggcgtggacaagtataggggtatttctgacccttctcctcatttcacctcttctttctcccacgggttcctttctggaagcctcttttgcctacacaccggcaggtaagccatctctgccccagtggggttcagaccccccgggacgggcccttctctcactcattcgccccctcattttccccagtgtccttcccgcactcagagggcctctctggagccagttccaggtaattctcttagcccatttcctcaggatgacctccaccgacaggccactcttcttccgccccgctgacgccccaggtggagggagcatggccacctcccaccccaacaccaccgccactgtcctgaaactcccgaatatcgccacctccctttcctttgctggcctcttcaggctctccgtccccaacgctcacctgctctccctcaggccacccatgggccttggccccgccccctactcatggctggcagattcgtggccccacccatctcgaagcccctcggcccaggaacccaggggaagctgctgccctagcaatcctgacccggacgacagatattacaacggtgaggagttctcattccctcacctggcttcagcgcacttctcccgacctactggggcaaaccgaagggcgcccgggagcccggtctctctgaggttggtcagtccctggggaggatgtgagctggggaagcctctcagacctacctccaccctggtttaggatgtaaggcttgtgtgggggaagaagttgatcccgtgggatttccctttgtcttccattctgttgtcctctatgtttctgtctctgcttccgggcctccctctttcttctctgcagaagcgggaatctccctgtatctagctcagacggccaggggcacggccgcccctggcgagggtcctgtctatagcaccattgacccagcgggggaggagctgcagaccttccatgggggcttcccccaacatccctcaggagatctgggtccctggagccagtacgctcctccagagtggagccagggggacagtggtatgactccaactcctgaaaccccgtttagccctgaccagggtatccccaaagaggatcctcctccctgaccctctggcacctagcccggcacttccttctgacctgtctcatctctggctctttcctgcctgttctccgggtgtccccatcctattctcctcaggagccaagggaggcaaagtgaagcttctggggaaacctgtgcagatgccctctctgaactggccagaagccctgcccccacctcctccttcttgtgaactgagctgcctagaagggccggaggaggagctggagggcaggtagagatgctccctgcttccaggcccacacacctgcggccagaccatgggctgctggggaggaaggggagggggcagcaggaaggccaacgggaaggtatggaagcagctgagccctttccttctctcctgcctctttgatcccagctcagagccagaggagtggtgcccgccaatgcctgagagaagtcacctgacggagcccagctccagtggagggtgcctggtcaccccatcccgaagggaaaccccctctcccacaccttcctatggacagcagtccacagccactcttacaccctcacctcctgaccctccccagcccccaactgacatgccccatctccatcagatgcccaggtagggaggtatatagtacctcactcattgcaagccctctatacgtatctactcagtagatgactgggtgggtggatggatggatgggtggatggatctggggtacagaggtctcagggctgtgtcagggtggaagtgtaatttgggcaggaatatggaggctgacaagatctctcatgcccattagactggctcttgctggagtggtcagcactctacctgagacatttcagatatggctctccttatgcttctctagcttgggaggacttacgggcggacgggttgtgtctcgtttatctgttaggttgattgtctagcacagtgccaggcacatagtaggcattcagtttttgtggagggaacagaggctgcggcctcctgtcattgcaggagggtgccccttgggccgagttcccctctcagtgtatcccagcccatgctgggcatccgtgaagcgaggcctgctggcttgggtgctggccctgcagcctcaccccacctcagcccc

SEQ ID NO: 13797 - DNA, 706 bp, Homo sapiens
acgaggaggccaggctttgcaaccatctccataaagaaggggcaagttcgaggacggaaagcccactcaaagggcggggggcggggcctggcaagagggggtgtggccaggatcccaggcagtaaattgtgcggcggggtctggatggaaaggcggggcccgctgaaagaaggcgatccgagttctgctacttcctagtaagggacgtctctggagagattctgaggtgtttgaggccacccatgggccttggccccgccccctactcatggctggcagattcgtggccccacccatctcgaagcccctcggcccaggaacccaggggaagctgctgccctagcaatcctgacccggacgacagatattacaacgctcagagccagaggagtggtgcccgccaatgcctgagagaagtcacctgacggagcccagctccagtggagggtgcctggtcaccccatcccgaagggaaaccccctctcccacaccttcctatggacagcagtccacagccactcttacaccctcacctcctgaccctccccagcccccaactgacatgccccatctccatcagatgcccaggagggtgccccttgggccgagttcccctctcagtgtatcccagcccatgctgggcatccgtgaagcgaggcctgctggcttgggtgctggccctgcagcctcaccccacctcagcccc

SEQ ID NO: 13798 - DNA, 3038 bp, Homo sapiens
atggaaaggcggggcccgctgaaagaaggcgatccgagttctgctacttcctagtaagggacgtctctggagagattctgaggtgtttgaggtcagtggttttcaatcttggttggctacacataggaatcacttgaggggcttgagaaaaataccgacacctgagtcccacccccgagaaattctgatgaaatgggtccagggtgcagcctgagtggtggaactgggaccggggcctaggcgtggacaagtataggggtatttctgacccttctcctcatttcacctcttctttctcccacgggttcctttctggaagcctcttttgcctacacaccggcaggtaagccatctctgccccagtggggttcagaccccccgggacgggcccttctctcactcattcgccccctcattttccccagtgtccttcccgcactcagagggcctctctggagccagttccaggtaattctcttagcccatttcctcaggatgacctccaccgacaggccactcttcttccgccccgctgacgccccaggtggagggagcatggccacctcccaccccaacaccaccgccactgtcctgaaactcccgaatatcgccacctccctttcctttgctggcctcttcaggctctccgtccccaacgctcacctgctctccctcaggccacccatgggccttggccccgccccctactcatggctggcagattcgtggccccacccatctcgaagcccctcggcccaggaacccaggggaagctgctgccctagcaatcctgacccggacgacagatattacaacggtgaggagttctcattccctcacctggcttcagcgcacttctcccgacctactggggcaaaccgaagggcgcccgggagcccggtctctctgaggttggtcagtccctggggaggatgtgagctggggaagcctctcagacctacctccaccctggtttaggatgtaaggcttgtgtgggggaagaagttgatcccgtgggatttccctttgtcttccattctgttgtcctctatgtttctgtctctgcttccgggcctccctctttcttctctgcagaagcgggaatctccctgtatctagctcagacggccaggggcacggccgcccctggcgagggtcctgtctatagcaccattgacccagcgggggaggagctgcagaccttccatgggggcttcccccaacatccctcaggagatctgggtccctggagccagtacgctcctccagagtggagccagggggacagtggtatgactccaactcctgaaaccccgtttagccctgaccagggtatccccaaagaggatcctcctccctgaccctctggcacctagcccggcacttccttctgacctgtctcatctctggctctttcctgcctgttctccgggtgtccccatcctattctcctcaggagccaagggaggcaaagtgaagcttctggggaaacctgtgcagatgccctctctgaactggccagaagccctgcccccacctcctccttcttgtgaactgagctgcctagaagggccggaggaggagctggagggcaggtagagatgctccctgcttccaggcccacacacctgcggccagaccatgggctgctggggaggaaggggagggggcagcaggaaggccaacgggaaggtatggaagcagctgagccctttccttctctcctgcctctttgatcccagctcagagccagaggagtggtgcccgccaatgcctgagagaagtcacctgacggagcccagctccagtggagggtgcctggtcaccccatcccgaagggaaaccccctctcccacaccttcctatggacagcagtccacagccactcttacaccctcacctcctgaccctccccagcccccaactgacatgccccatctccatcagatgcccaggtagggaggtatatagtacctcactcattgcaagccctctatacgtatctactcagtagatgactgggtgggtggatggatggatgggtggatggatctggggtacagaggtctcagggctgtgtcagggtggaagtgtaatttgggcaggaatatggaggctgacaagatctctcatgcccattagactggctcttgctggagtggtcagcactctacctgagacatttcagatatggctctccttatgcttctctagcttgggaggacttacgggcggacgggttgtgtctcgtttatctgttaggttgattgtctagcacagtgccaggcacatagtaggcattcagtttttgtggagggaacagaggctgcggcctcctgtcattgcaggagggtgccccttgggccgagttcccctctcagtgtatcccagcccatgctgggcatccgtgaagcgaggcctgctggcttgggtgctggccctgcagcctcaccccacctcagccccagtcctgcccctagcacagccagcagtgccccaggtaagtctctacaacctccttttgccccccggctccctccagtgcttgcttccccttcacccttaggcctttttcctgatttttgcccttacccattcctcttcccgtctcctaacactgcaggcagaacctggcaggggaatggggagatgactcccccacttcaaggaccccgtgctcgattccggaagaaacccaaggctcttccctacaggagggagaacagtcctgggggtgaggggggatgcacctgggagatggtgacagtagtggcggggggataggcaggaaaccaagggtgcactctgggggctggaggagggaacaggtgaaccccaatcttgggctgttcattggcagcctcctggtgccagggaatgcaggtgagagaaagattagtgacaggagtggcaggaggctccgctgaaaacagctccctccccagacttgcccccaccacccttgccaccgccagaggaagaggcgagctgggccctagagctgagggcagcaggcagcatgtcctccctggagcggg

SEQ ID NO: 13799 - DNA, 825 bp, Homo sapiens
atggaaaggcggggcccgctgaaagaaggcgatccgagttctgctacttcctagtaagggacgtctctggagagattctgaggtgtttgagagggcctctctggagccagttccaggccacccatgggccttggccccgccccctactcatggctggcagattcgtggccccacccatctcgaagcccctcggcccaggaacccaggggaagctgctgccctagcaatcctgacccggacgacagatattacaacgctcagagccagaggagtggtgcccgccaatgcctgagagaagtcacctgacggagcccagctccagtggagggtgcctggtcaccccatcccgaagggaaaccccctctcccacaccttcctatggacagcagtccacagccactcttacaccctcacctcctgaccctccccagcccccaactgacatgccccatctccatcagatgcccaggagggtgccccttgggccgagttcccctctcagtgtatcccagcccatgctgggcatccgtgaagcgaggcctgctggcttgggtgctggccctgcagcctcaccccacctcagccccagtcctgcccctagcacagccagcagtgccccaggcagaacctggcaggggaatggggagatgactcccccacttcaaggaccccgtgctcgattccggaagaaacccaaggctcttccctacaggagggagaacagtcctggggacttgcccccaccacccttgccaccgccagaggaagaggcgagctgggccctagagctgagggcagcaggcagcatgtcctccctggagcggg

SEQ ID NO: 13800 - DNA, 4997 bp, Homo sapiens
cggcctcggagcggacggatccgggagggagccaggcggcccatggggaggggcaggggcttagccgctggcgagtgaggaccgggtcgggagaaaggggtcgcacctggagttcagcctcttgggtaggggcgggatacgtggggcgactcgaggagctgccaggactagggagggctgcgggccaagacggggcgggatctggatgacgtttgcctctaagacgccacgaggaggccaggctttgcaaccatctccataaagaaggggcaagttcgaggacggaaagcccactcaaagggcggggggcggggcctggcaagagggggtgtggccaggatcccaggcagtaaattgtgcggcggggtctggatggaaaggcggggcccgctgaaagaaggcgatccgagttctgctacttcctagtaagggacgtctctggagagattctgaggtgtttgaggtcagtggttttcaatcttggttggctacacataggaatcacttgaggggcttgagaaaaataccgacacctgagtcccacccccgagaaattctgatgaaatgggtccagggtgcagcctgagtggtggaactgggaccggggcctaggcgtggacaagtataggggtatttctgacccttctcctcatttcacctcttctttctcccacgggttcctttctggaagcctcttttgcctacacaccggcaggtaagccatctctgccccagtggggttcagaccccccgggacgggcccttctctcactcattcgccccctcattttccccagtgtccttcccgcactcagagggcctctctggagccagttccaggtaattctcttagcccatttcctcaggatgacctccaccgacaggccactcttcttccgccccgctgacgccccaggtggagggagcatggccacctcccaccccaacaccaccgccactgtcctgaaactcccgaatatcgccacctccctttcctttgctggcctcttcaggctctccgtccccaacgctcacctgctctccctcaggccacccatgggccttggccccgccccctactcatggctggcagattcgtggccccacccatctcgaagcccctcggcccaggaacccaggggaagctgctgccctagcaatcctgacccggacgacagatattacaacggtgaggagttctcattccctcacctggcttcagcgcacttctcccgacctactggggcaaaccgaagggcgcccgggagcccggtctctctgaggttggtcagtccctggggaggatgtgagctggggaagcctctcagacctacctccaccctggtttaggatgtaaggcttgtgtgggggaagaagttgatcccgtgggatttccctttgtcttccattctgttgtcctctatgtttctgtctctgcttccgggcctccctctttcttctctgcagaagcgggaatctccctgtatctagctcagacggccaggggcacggccgcccctggcgagggtcctgtctatagcaccattgacccagcgggggaggagctgcagaccttccatgggggcttcccccaacatccctcaggagatctgggtccctggagccagtacgctcctccagagtggagccagggggacagtggtatgactccaactcctgaaaccccgtttagccctgaccagggtatccccaaagaggatcctcctccctgaccctctggcacctagcccggcacttccttctgacctgtctcatctctggctctttcctgcctgttctccgggtgtccccatcctattctcctcaggagccaagggaggcaaagtgaagcttctggggaaacctgtgcagatgccctctctgaactggccagaagccctgcccccacctcctccttcttgtgaactgagctgcctagaagggccggaggaggagctggagggcaggtagagatgctccctgcttccaggcccacacacctgcggccagaccatgggctgctggggaggaaggggagggggcagcaggaaggccaacgggaaggtatggaagcagctgagccctttccttctctcctgcctctttgatcccagctcagagccagaggagtggtgcccgccaatgcctgagagaagtcacctgacggagcccagctccagtggagggtgcctggtcaccccatcccgaagggaaaccccctctcccacaccttcctatggacagcagtccacagccactcttacaccctcacctcctgaccctccccagcccccaactgacatgccccatctccatcagatgcccaggtagggaggtatatagtacctcactcattgcaagccctctatacgtatctactcagtagatgactgggtgggtggatggatggatgggtggatggatctggggtacagaggtctcagggctgtgtcagggtggaagtgtaatttgggcaggaatatggaggctgacaagatctctcatgcccattagactggctcttgctggagtggtcagcactctacctgagacatttcagatatggctctccttatgcttctctagcttgggaggacttacgggcggacgggttgtgtctcgtttatctgttaggttgattgtctagcacagtgccaggcacatagtaggcattcagtttttgtggagggaacagaggctgcggcctcctgtcattgcaggagggtgccccttgggccgagttcccctctcagtgtatcccagcccatgctgggcatccgtgaagcgaggcctgctggcttgggtgctggccctgcagcctcaccccacctcagccccagtcctgcccctagcacagccagcagtgccccaggtaagtctctacaacctccttttgccccccggctccctccagtgcttgcttccccttcacccttaggcctttttcctgatttttgcccttacccattcctcttcccgtctcctaacactgcaggcagaacctggcaggggaatggggagatgactcccccacttcaaggaccccgtgctcgattccggaagaaacccaaggctcttccctacaggagggagaacagtcctgggggtgaggggggatgcacctgggagatggtgacagtagtggcggggggataggcaggaaaccaagggtgcactctgggggctggaggagggaacaggtgaaccccaatcttgggctgttcattggcagcctcctggtgccagggaatgcaggtgagagaaagattagtgacaggagtggcaggaggctccgctgaaaacagctccctccccagacttgcccccaccacccttgccaccgccagaggaagaggcgagctgggccctagagctgagggcagcaggcagcatgtcctccctggagcgggagcgcagtggggagaggaaagcggtccaggccgtgcccctggcagcccagcgggtgctccacccagatggtaagcagggccagggcaggcaggagggctgctgccacaggagactgtgggctttgggactgggggctgatagtagaccagctcagccctccctttagttaggttcatgcatttgatccacatcaaactcccctgtctctctaactctctgagcacaatcccctgaagtcccaagttgtgttcattcccaggatggaagcccagataagaggactgggctctaggtgctctgtccccgctccccacaaggctccctctgattgggagctcccccgcagcgttctgagcacccatgatgtcaaggccatgtgccggtcactctgctgctcctcagccccaggctggctgagccctgtgcctgcccttcatcttcttccagagctgagcctgtggtcagggtggcagggtgggtgacagggaagttctgcttcctgcctgcacctggctacccttccctcttgtgctgcagaagaggcctggctcccatacagcagaccaagcttcctgtcccggggccagggcaccagcacatgttccacggccggcagcaactcttccaggggctccagcagctctaggggctcccggggccctggccggagccggagtcggagtcagagccggagccagagccaaaggccaggacagaaacgccgagaggtaggggccatagattgcagaaaaatgagggcagaggactagggaagggtggaccaaggcgtaatggaaaacaggaaggtgggcaagggcttgtggaggagtgtcaaaaggaggggatcgagagggtgagggggagggaggaatcctgtagaagtgacaaggggactgagcgtggtggctcatgcctgtaatcccagcactttgggagaccgagatgggcggatcccttgagctcaggagtttgagactagcctgggcaatatggtaaaatcccatctctacaaaaaatacaaaattagctgggcgtggtggtatgctcctgtagtcccagctactcagggggcttgaggtgggaggatagcttgagcctgggaggtcaaggctgcagtgagccatgatcacaccactgctctccagtctgggcgacagagtgagactctgtctcaaacaaacaaacagacaaacaaaacaaaagaaatgacaaggggtgaggacaagatgacacataatagaggagcctgggctcaccgtaggagaactgggttaggagagagaaagcctgagcccttcctggacttgtttgccctgggccagggttttacaaaacagcatctctctctctctccctaggaaccaagatgacccttgttggggcattgagaatatcatgagtgccacggggaaggggagtagggatgtcttttcccccccagcagtgatgagtggggctagctgaagcccattggtttccacgatttcaattggctgagaaggcagagagctagctcctccctttctttctttttccacctgagacttgtttataaaaaacaaaacaataaaaagagtctgatcaga

SEQ ID NO: 13801 - DNA, 2272 bp, Homo sapiens
cggcctcggagcggacggatccgggagggagccaggcggcccatggggaggggcaggggcttagccgctggcgagtgaggaccgggtcgggagaaaggggtcgcacctggagttcagcctcttgggtaggggcgggatacgtggggcgactcgaggagctgccaggactagggagggctgcgggccaagacggggcgggatctggatgacgtttgcctctaagacgccacgaggaggccaggctttgcaaccatctccataaagaaggggcaagttcgaggacggaaagcccactcaaagggcggggggcggggcctggcaagagggggtgtggccaggatcccaggcagtaaattgtgcggcggggtctggatggaaaggcggggcccgctgaaagaaggcgatccgagttctgctacttcctagtaagggacgtctctggagagattctgaggtgtttgaggccacccatgggccttggccccgccccctactcatggctggcagattcgtggccccacccatctcgaagcccctcggcccaggaacccaggggaagctgctgccctagcaatcctgacccggacgacagatattacaacggtgaggagttctcattccctcacctggcttcagcgcacttctcccgacctactggggcaaaccgaagggcgcccgggagcccggtctctctgaggttggtcagtccctggggaggatgtgagctggggaagcctctcagacctacctccaccctggtttaggatgtaaggcttgtgtgggggaagaagttgatcccgtgggatttccctttgtcttccattctgttgtcctctatgtttctgtctctgcttccgggcctccctctttcttctctgcagaagcgggaatctccctgtatctagctcagacggccaggggcacggccgcccctggcgagggtcctgtctatagcaccattgacccagcgggggaggagctgcagaccttccatgggggcttcccccaacatccctcaggagatctgggtccctggagccagtacgctcctccagagtggagccagggggacagtggagccaagggaggcaaagtgaagcttctggggaaacctgtgcagatgccctctctgaactggccagaagccctgcccccacctcctccttcttgtgaactgagctgcctagaagggccggaggaggagctggagggcagctcagagccagaggagtggtgcccgccaatgcctgagagaagtcacctgacggagcccagctccagtggagggtgcctggtcaccccatcccgaagggaaaccccctctcccacaccttcctatggacagcagtccacagccactcttacaccctcacctcctgaccctccccagcccccaactgacatgccccatctccatcagatgcccaggagggtgccccttgggccgagttcccctctcagtgtatcccagcccatgctgggcatccgtgaagcgaggcctgctggcttgggtgctggccctgcagcctcaccccacctcagccccagtcctgcccctagcacagccagcagtgccccaggcagaacctggcaggggaatggggagatgactcccccacttcaaggaccccgtgctcgattccggaagaaacccaaggctcttccctacaggagggagaacagtcctggggacttgcccccaccacccttgccaccgccagaggaagaggcgagctgggccctagagctgagggcagcaggcagcatgtcctccctggagcgggagcgcagtggggagaggaaagcggtccaggccgtgcccctggcagcccagcgggtgctccacccagatgaagaggcctggctcccatacagcagaccaagcttcctgtcccggggccagggcaccagcacatgttccacggccggcagcaactcttccaggggctccagcagctctaggggctcccggggccctggccggagccggagtcggagtcagagccggagccagagccaaaggccaggacagaaacgccgagaggaaccaagatgacccttgttggggcattgagaatatcatgagtgccacggggaaggggagtagggatgtcttttcccccccagcagtgatgagtggggctagctgaagcccattggtttccacgatttcaattggctgagaaggcagagagctagctcctccctttctttctttttccacctgagacttgtttataaaaaacaaaacaataaaaagagtctgatcaga

SEQ ID NO: 13802 - DNA, 1085 bp, Homo sapiens
gtgcggcggggtctggatggaaaggcggggcccgctgaaagaaggcgatccgagttctgctacttcctagtaagggacgtctctggagagattctgaggtgtttgaggtcagtggttttcaatcttggttggctacacataggaatcacttgaggggcttgagaaaaataccgacacctgagtcccacccccgagaaattctgatgaaatgggtccagggtgcagcctgagtggtggaactgggaccggggcctaggcgtggacaagtataggggtatttctgacccttctcctcatttcacctcttctttctcccacgggttcctttctggaagcctcttttgcctacacaccggcaggtaagccatctctgccccagtggggttcagaccccccgggacgggcccttctctcactcattcgccccctcattttccccagtgtccttcccgcactcagagggcctctctggagccagttccaggtaattctcttagcccatttcctcaggatgacctccaccgacaggccactcttcttccgccccgctgacgccccaggtggagggagcatggccacctcccaccccaacaccaccgccactgtcctgaaactcccgaatatcgccacctccctttcctttgctggcctcttcaggctctccgtccccaacgctcacctgctctccctcaggccacccatgggccttggccccgccccctactcatggctggcagattcgtggccccacccatctcgaagcccctcggcccaggaacccaggggaagctgctgccctagcaatcctgacccggacgacagatattacaacggtgaggagttctcattccctcacctggcttcagcgcacttctcccgacctactggggcaaaccgaagggcgcccgggagcccggtctctctgaggttggtcagtccctggggaggatgtgagctggggaagcctctcagacctacctccaccctggtttaggatgtaaggcttgtgtgggggaagaagttgatcccgtgggatttccctttgtcttccattctgttgtcctctatgtttctgtctctgcttc

SEQ ID NO: 13803 - DNA, 542 bp, Homo sapiens
gtgcggcggggtctggatggaaaggcggggcccgctgaaagaaggcgatccgagttctgctacttcctagtaagggacgtctctggagagattctgaggtgtttgagtgtccttcccgcactcagagggcctctctggagccagttccaggccacccatgggccttggccccgccccctactcatggctggcagattcgtggccccacccatctcgaagcccctcggcccaggaacccaggggaagctgctgccctagcaatcctgacccggacgacagatattacaacggtgaggagttctcattccctcacctggcttcagcgcacttctcccgacctactggggcaaaccgaagggcgcccgggagcccggtctctctgaggttggtcagtccctggggaggatgtgagctggggaagcctctcagacctacctccaccctggtttaggatgtaaggcttgtgtgggggaagaagttgatcccgtgggatttccctttgtcttccattctgttgtcctctatgtttctgtctctgcttc

SEQ ID NO: 13804 - DNA, 3070 bp, Homo sapiens
ccgagttctgctacttcctagtaagggacgtctctggagagattctgaggtgtttgaggtcagtggttttcaatcttggttggctacacataggaatcacttgaggggcttgagaaaaataccgacacctgagtcccacccccgagaaattctgatgaaatgggtccagggtgcagcctgagtggtggaactgggaccggggcctaggcgtggacaagtataggggtatttctgacccttctcctcatttcacctcttctttctcccacgggttcctttctggaagcctcttttgcctacacaccggcaggtaagccatctctgccccagtggggttcagaccccccgggacgggcccttctctcactcattcgccccctcattttccccagtgtccttcccgcactcagagggcctctctggagccagttccaggtaattctcttagcccatttcctcaggatgacctccaccgacaggccactcttcttccgccccgctgacgccccaggtggagggagcatggccacctcccaccccaacaccaccgccactgtcctgaaactcccgaatatcgccacctccctttcctttgctggcctcttcaggctctccgtccccaacgctcacctgctctccctcaggccacccatgggccttggccccgccccctactcatggctggcagattcgtggccccacccatctcgaagcccctcggcccaggaacccaggggaagctgctgccctagcaatcctgacccggacgacagatattacaacggtgaggagttctcattccctcacctggcttcagcgcacttctcccgacctactggggcaaaccgaagggcgcccgggagcccggtctctctgaggttggtcagtccctggggaggatgtgagctggggaagcctctcagacctacctccaccctggtttaggatgtaaggcttgtgtgggggaagaagttgatcccgtgggatttccctttgtcttccattctgttgtcctctatgtttctgtctctgcttccgggcctccctctttcttctctgcagaagcgggaatctccctgtatctagctcagacggccaggggcacggccgcccctggcgagggtcctgtctatagcaccattgacccagcgggggaggagctgcagaccttccatgggggcttcccccaacatccctcaggagatctgggtccctggagccagtacgctcctccagagtggagccagggggacagtggtatgactccaactcctgaaaccccgtttagccctgaccagggtatccccaaagaggatcctcctccctgaccctctggcacctagcccggcacttccttctgacctgtctcatctctggctctttcctgcctgttctccgggtgtccccatcctattctcctcaggagccaagggaggcaaagtgaagcttctggggaaacctgtgcagatgccctctctgaactggccagaagccctgcccccacctcctccttcttgtgaactgagctgcctagaagggccggaggaggagctggagggcaggtagagatgctccctgcttccaggcccacacacctgcggccagaccatgggctgctggggaggaaggggagggggcagcaggaaggccaacgggaaggtatggaagcagctgagccctttccttctctcctgcctctttgatcccagctcagagccagaggagtggtgcccgccaatgcctgagagaagtcacctgacggagcccagctccagtggagggtgcctggtcaccccatcccgaagggaaaccccctctcccacaccttcctatggacagcagtccacagccactcttacaccctcacctcctgaccctccccagcccccaactgacatgccccatctccatcagatgcccaggtagggaggtatatagtacctcactcattgcaagccctctatacgtatctactcagtagatgactgggtgggtggatggatggatgggtggatggatctggggtacagaggtctcagggctgtgtcagggtggaagtgtaatttgggcaggaatatggaggctgacaagatctctcatgcccattagactggctcttgctggagtggtcagcactctacctgagacatttcagatatggctctccttatgcttctctagcttgggaggacttacgggcggacgggttgtgtctcgtttatctgttaggttgattgtctagcacagtgccaggcacatagtaggcattcagtttttgtggagggaacagaggctgcggcctcctgtcattgcaggagggtgccccttgggccgagttcccctctcagtgtatcccagcccatgctgggcatccgtgaagcgaggcctgctggcttgggtgctggccctgcagcctcaccccacctcagccccagtcctgcccctagcacagccagcagtgccccaggtaagtctctacaacctccttttgccccccggctccctccagtgcttgcttccccttcacccttaggcctttttcctgatttttgcccttacccattcctcttcccgtctcctaacactgcaggcagaacctggcaggggaatggggagatgactcccccacttcaaggaccccgtgctcgattccggaagaaacccaaggctcttccctacaggagggagaacagtcctgggggtgaggggggatgcacctgggagatggtgacagtagtggcggggggataggcaggaaaccaagggtgcactctgggggctggaggagggaacaggtgaaccccaatcttgggctgttcattggcagcctcctggtgccagggaatgcaggtgagagaaagattagtgacaggagtggcaggaggctccgctgaaaacagctccctccccagacttgcccccaccacccttgccaccgccagaggaagaggcgagctgggccctagagctgagggcagcaggcagcatgtcctccctggagcgggagcgcagtggggagaggaaagcggtccaggccgtgcccctggcagcccagcgggtgctccaccca

SEQ ID NO: 13805 - DNA, 662 bp, Homo sapiens
ccgagttctgctacttcctagtaagggacgtctctggagagattctgaggtgtttgagtgtccttcccgcactcagagggcctctctggagccagttccaggccacccatgggccttggccccgccccctactcatggctggcagattcgtggccccacccatctcgaagcccctcggcccaggaacccaggggaagctgctgccctagcaatcctgacccggacgacagatattacaacggagggtgccccttgggccgagttcccctctcagtgtatcccagcccatgctgggcatccgtgaagcgaggcctgctggcttgggtgctggccctgcagcctcaccccacctcagccccagtcctgcccctagcacagccagcagtgccccaggcagaacctggcaggggaatggggagatgactcccccacttcaaggaccccgtgctcgattccggaagaaacccaaggctcttccctacaggagggagaacagtcctggggacttgcccccaccacccttgccaccgccagaggaagaggcgagctgggccctagagctgagggcagcaggcagcatgtcctccctggagcgggagcgcagtggggagaggaaagcggtccaggccgtgcccctggcagcccagcgggtgctccaccca

SEQ ID NO: 13806 - DNA, 975 bp, Homo sapiens
aattgtgcggcggggtctggatggaaaggcggggcccgctgaaagaaggcgatccgagttctgctacttcctagtaagggacgtctctggagagattctgaggtgtttgaggtcagtggttttcaatcttggttggctacacataggaatcacttgaggggcttgagaaaaataccgacacctgagtcccacccccgagaaattctgatgaaatgggtccagggtgcagcctgagtggtggaactgggaccggggcctaggcgtggacaagtataggggtatttctgacccttctcctcatttcacctcttctttctcccacgggttcctttctggaagcctcttttgcctacacaccggcaggtaagccatctctgccccagtggggttcagaccccccgggacgggcccttctctcactcattcgccccctcattttccccagtgtccttcccgcactcagagggcctctctggagccagttccaggtaattctcttagcccatttcctcaggatgacctccaccgacaggccactcttcttccgccccgctgacgccccaggtggagggagcatggccacctcccaccccaacaccaccgccactgtcctgaaactcccgaatatcgccacctccctttcctttgctggcctcttcaggctctccgtccccaacgctcacctgctctccctcaggccacccatgggccttggccccgccccctactcatggctggcagattcgtggccccacccatctcgaagcccctcggcccaggaacccaggggaagctgctgccctagcaatcctgacccggacgacagatattacaacggtgaggagttctcattccctcacctggcttcagcgcacttctcccgacctactggggcaaaccgaagggcgcccgggagcccggtctctctgaggttggtcagtccctggggaggatgtgagctggggaagcctctca

SEQ ID NO: 13807 - DNA, 538 bp, Homo sapiens
aattgtgcggcggggtctggatggaaaggcggggcccgctgaaagaaggcgatccgagttctgctacttcctagtaagggacgtctctggagagattctgaggtgtttgagcctcttttgcctacacaccggcaggtaagccatctctgccccagtggggttcagaccccccgggacgggcccttctctcactcattcgccccctcattttccccagtgtccttcccgcactcagagggcctctctggagccagttccaggccacccatgggccttggccccgccccctactcatggctggcagattcgtggccccacccatctcgaagcccctcggcccaggaacccaggggaagctgctgccctagcaatcctgacccggacgacagatattacaacggtgaggagttctcattccctcacctggcttcagcgcacttctcccgacctactggggcaaaccgaagggcgcccgggagcccggtctctctgaggttggtcagtccctggggaggatgtgagctggggaagcctctca

SEQ ID NO: 13808 - DNA, 1186 bp, Homo sapiens
ggatccgggagggagccaggcggcccatggggaggggcaggggcttagccgctggcgagtgaggaccgggtcgggagaaaggggtcgcacctggagttcagcctcttgggtaggggcgggatacgtggggcgactcgaggagctgccaggactagggagggctgcgggccaagacggggcgggatctggatgacgtttgcctctaagacgccacgaggaggccaggctttgcaaccatctccataaagaaggggcaagttcgaggacggaaagcccactcaaagggcggggggcggggcctggcaagagggggtgtggccaggatcccaggcagtaaattgtgcggcggggtctggatggaaaggcggggcccgctgaaagaaggcgatccgagttctgctacttcctagtaagggacgtctctggagagattctgaggtgtttgaggtcagtggttttcaatcttggttggctacacataggaatcacttgaggggcttgagaaaaataccgacacctgagtcccacccccgagaaattctgatgaaatgggtccagggtgcagcctgagtggtggaactgggaccggggcctaggcgtggacaagtataggggtatttctgacccttctcctcatttcacctcttctttctcccacgggttcctttctggaagcctcttttgcctacacaccggcaggtaagccatctctgccccagtggggttcagaccccccgggacgggcccttctctcactcattcgccccctcattttccccagtgtccttcccgcactcagagggcctctctggagccagttccaggtaattctcttagcccatttcctcaggatgacctccaccgacaggccactcttcttccgccccgctgacgccccaggtggagggagcatggccacctcccaccccaacaccaccgccactgtcctgaaactcccgaatatcgccacctccctttcctttgctggcctcttcaggctctccgtccccaacgctcacctgctctccctcaggccacccatgggccttggccccgccccctactcatggctggcagattcgtggccccacccatctcgaagcccctcggcccaggaacccaggggaagctgctgccctagcaatcctgacccggacgacagatattacaacggtgaggagttctc

SEQ ID NO: 13809 - DNA, 473 bp, Homo sapiens
ggatccgggagggagccaggcggcccatggggaggggcaggggcttagccgctggcgagtgaggaccgggtcgggagaaaggggtcgcacctggagttcagcctcttgggtaggggcgggatacgtggggcgactcgaggagctgccaggactagggagggctgcgggccaagacggggcgggatctggatgacgtttgcctctaagacgccacgaggaggccaggctttgcaaccatctccataaagaagggcctcttttgcctacacaccggcagtgtccttcccgcactcagagggcctctctggagccagttccaggccacccatgggccttggccccgccccctactcatggctggcagattcgtggccccacccatctcgaagcccctcggcccaggaacccaggggaagctgctgccctagcaatcctgacccggacgacagatattacaacggtgaggagttctc

SEQ ID NO: 13810 - DNA, 790 bp, Homo sapiens
ataaagaaggggcaagttcgaggacggaaagcccactcaaagggcggggggcggggcctggcaagagggggtgtggccaggatcccaggcagtaaattgtgcggcggggtctggatggaaaggcggggcccgctgaaagaaggcgatccgagttctgctacttcctagtaagggacgtctctggagagattctgaggtgtttgaggtcagtggttttcaatcttggttggctacacataggaatcacttgaggggcttgagaaaaataccgacacctgagtcccacccccgagaaattctgatgaaatgggtccagggtgcagcctgagtggtggaactgggaccggggcctaggcgtggacaagtataggggtatttctgacccttctcctcatttcacctcttctttctcccacgggttcctttctggaagcctcttttgcctacacaccggcaggtaagccatctctgccccagtggggttcagaccccccgggacgggcccttctctcactcattcgccccctcattttccccagtgtccttcccgcactcagagggcctctctggagccagttccaggtaattctcttagcccatttcctcaggatgacctccaccgacaggccactcttcttccgccccgctgacgccccaggtggagggagcatggccacctcccaccccaacaccaccgccactgtcctgaaactcccgaatatcgccacctccctttcctttgctggcctcttcaggctctccgtccccaacgctcacctgctctccctca

SEQ ID NO: 13811 - DNA, 562 bp, Homo sapiens
ataaagaaggggcaagttcgaggacggaaagcccactcaaagggcggggggcggggcctggcaagagggggtgtggccaggatcccaggcagtaaattgtgcggcggggtctggatggaaaggcggggcccgctgaaagaaggcgatccgagttctgctacttcctagtaagggacgtctctggagagattctgaggtgtttgagcctcttttgcctacacaccggcaggtaagccatctctgccccagtggggttcagaccccccgggacgggcccttctctcactcattcgccccctcattttccccagtgtccttcccgcactcagagggcctctctggagccagttccaggtaattctcttagcccatttcctcaggatgacctccaccgacaggccactcttcttccgccccgctgacgccccaggtggagggagcatggccacctcccaccccaacaccaccgccactgtcctgaaactcccgaatatcgccacctccctttcctttgctggcctcttcaggctctccgtccccaacgctcacctgctctccctca

SEQ ID NO: 13812 - DNA, 924 bp, Homo sapiens
agtaaattgtgcggcggggtctggatggaaaggcggggcccgctgaaagaaggcgatccgagttctgctacttcctagtaagggacgtctctggagagattctgaggtgtttgaggtcagtggttttcaatcttggttggctacacataggaatcacttgaggggcttgagaaaaataccgacacctgagtcccacccccgagaaattctgatgaaatgggtccagggtgcagcctgagtggtggaactgggaccggggcctaggcgtggacaagtataggggtatttctgacccttctcctcatttcacctcttctttctcccacgggttcctttctggaagcctcttttgcctacacaccggcaggtaagccatctctgccccagtggggttcagaccccccgggacgggcccttctctcactcattcgccccctcattttccccagtgtccttcccgcactcagagggcctctctggagccagttccaggtaattctcttagcccatttcctcaggatgacctccaccgacaggccactcttcttccgccccgctgacgccccaggtggagggagcatggccacctcccaccccaacaccaccgccactgtcctgaaactcccgaatatcgccacctccctttcctttgctggcctcttcaggctctccgtccccaacgctcacctgctctccctcaggccacccatgggccttggccccgccccctactcatggctggcagattcgtggccccacccatctcgaagcccctcggcccaggaacccaggggaagctgctgccctagcaatcctgacccggacgacagatattacaacggtgaggagttctcattccctcacctggcttcagcgcacttctcccgacctactggggcaaaccgaagggcgcccgggagcccg

SEQ ID NO: 13813 - DNA, 546 bp, Homo sapiens
agtaaattgtgcggcggggtctggatggaaaggcggggcccgctgaaagaaggcgatccgagttctgctacttcctagtaagggacgtctctggagagattctgaggtgtttgaggtcagtggttttcaatcttggttggctacacataggaatcacttgaggggcttgagaaaaataccgacacctgagtcccacccccgagaaattctgatgaaatgggtccagggtgcagcctgagtggtggaactgggaccggggcctaggcgtggacaagtataggggtatttctgacccttctcctcatttcacctcttctttctcccacgggttcctttctggaagcctcttttgcctacacaccggcagattcgtggccccacccatctcgaagcccctcggcccaggaacccaggggaagctgctgccctagcaatcctgacccggacgacagatattacaacggtgaggagttctcattccctcacctggcttcagcgcacttctcccgacctactggggcaaaccgaagggcgcccgggagcccg

SEQ ID NO: 13814 - DNA, 1565 bp, Homo sapiens
aaaggcggggcccgctgaaagaaggcgatccgagttctgctacttcctagtaagggacgtctctggagagattctgaggtgtttgaggtcagtggttttcaatcttggttggctacacataggaatcacttgaggggcttgagaaaaataccgacacctgagtcccacccccgagaaattctgatgaaatgggtccagggtgcagcctgagtggtggaactgggaccggggcctaggcgtggacaagtataggggtatttctgacccttctcctcatttcacctcttctttctcccacgggttcctttctggaagcctcttttgcctacacaccggcaggtaagccatctctgccccagtggggttcagaccccccgggacgggcccttctctcactcattcgccccctcattttccccagtgtccttcccgcactcagagggcctctctggagccagttccaggtaattctcttagcccatttcctcaggatgacctccaccgacaggccactcttcttccgccccgctgacgccccaggtggagggagcatggccacctcccaccccaacaccaccgccactgtcctgaaactcccgaatatcgccacctccctttcctttgctggcctcttcaggctctccgtccccaacgctcacctgctctccctcaggccacccatgggccttggccccgccccctactcatggctggcagattcgtggccccacccatctcgaagcccctcggcccaggaacccaggggaagctgctgccctagcaatcctgacccggacgacagatattacaacggtgaggagttctcattccctcacctggcttcagcgcacttctcccgacctactggggcaaaccgaagggcgcccgggagcccggtctctctgaggttggtcagtccctggggaggatgtgagctggggaagcctctcagacctacctccaccctggtttaggatgtaaggcttgtgtgggggaagaagttgatcccgtgggatttccctttgtcttccattctgttgtcctctatgtttctgtctctgcttccgggcctccctctttcttctctgcagaagcgggaatctccctgtatctagctcagacggccaggggcacggccgcccctggcgagggtcctgtctatagcaccattgacccagcgggggaggagctgcagaccttccatgggggcttcccccaacatccctcaggagatctgggtccctggagccagtacgctcctccagagtggagccagggggacagtggtatgactccaactcctgaaaccccgtttagccctgaccagggtatccccaaagaggatcctcctccctgaccctctggcacctagcccggcacttccttctgacctgtctcatctctggctctttcctgcctgttctccgggtgtccccatcctattctcctcaggagccaagggaggcaaagtgaagcttctggggaaacctgtgcagatgccctctctgaactggccagaagccctgcccccacctcctccttcttgtgaactgagctgcctagaa

SEQ ID NO: 13815 - DNA, 1046 bp, Homo sapiens
aaaggcggggcccgctgaaagaaggcgatccgagttctgctacttcctagtaagggacgtctctggagagattctgaggtgtttgagcctcttttgcctacacaccggcagtgtccttcccgcactcagagggcctctctggagccagttccaggccacccatgggccttggccccgccccctactcatggctggcagattcgtggccccacccatctcgaagcccctcggcccaggaacccaggggaagctgctgccctagcaatcctgacccggacgacagatattacaacggtgaggagttctcattccctcacctggcttcagcgcacttctcccgacctactggggcaaaccgaagggcgcccgggagcccggtctctctgaggttggtcagtccctggggaggatgtgagctggggaagcctctcagacctacctccaccctggtttaggatgtaaggcttgtgtgggggaagaagttgatcccgtgggatttccctttgtcttccattctgttgtcctctatgtttctgtctctgcttccgggcctccctctttcttctctgcagaagcgggaatctccctgtatctagctcagacggccaggggcacggccgcccctggcgagggtcctgtctatagcaccattgacccagcgggggaggagctgcagaccttccatgggggcttcccccaacatccctcaggagatctgggtccctggagccagtacgctcctccagagtggagccagggggacagtggtatgactccaactcctgaaaccccgtttagccctgaccagggtatccccaaagaggatcctcctccctgaccctctggcacctagcccggcacttccttctgacctgtctcatctctggctctttcctgcctgttctccgggtgtccccatcctattctcctcaggagccaagggaggcaaagtgaagcttctggggaaacctgtgcagatgccctctctgaactggccagaagccctgcccccacctcctccttcttgtgaactgagctgcctagaa

SEQ ID NO: 13816 - DNA, 12999 bp, Homo sapiens
tcgccaagcgtggttcagccactcccgcttaaacttggcaggagaggagacggaggtctctaggtggtccagaaagccggcctagaagtttgtgtcccgatccctctactaaccggcctgtctgtaggcatcttcctttgagacgaggaacgcggaacgtctgccaataaggacatattggatcctgcagagggagagggtaggcaggtggggactgagctccgcagagaagcataggagatggaacgaccagaggattctctttccctctggagcctcaatctctccccacaatttccctgtctgaacgctctgcgccaccccctgtccccagggtcaagggtaggaccggaggacgctatgccccgcatcgtggagcagccgccagatctgctggtctcccgaggcgagcccgccacgttgccctgccgcgctgaaggccgaccccgacccaacattgagtggtacaagaacggggcgcgtgtggccactgtgcgggaggatccgcgtgcgcaccgcctgctgctgcccagcggcgccctcttcttcccgcgcatcgtgcacgggcgccgcgcgcggccggacgaaggtgtctacacttgcgtggctcgcaactacctgggggcagcagcgagcagaaacgcctcgctggaagtggcaggtgagagtcagttgaccgtcagctggttgcttccagagcctggggtaggcgggagggcactgggcaatcagacccagaaccagccccaaaggacttcagcccactcagcatccttctttgggaccgcgacctttgatctctaatggccacaccacggccagagaaggaagtggatctgactccaggctgatattttctcacctgggaacgaattccagtctgcagcgatcaaccccttcccaagacaacactttccctgtgtcctcagccagttatgtcactctacaccctgcttatttcgccccccaccgccccgcccagtcctccgtgatgatttccggcagtctcctggaaacgtggtggtggcagtgggggagccagcagtactggaatgcgtgcccccccgcggccacccggagccttccgtgtcctggaggaaggacggtgcaagactcaaggaagaggaaggaaggatcacggtgagggcgggattatgattggagaccccaacaagggaggggacatagggtagggaggtgacaaggctggagattgagatcagggcattagctaaccagagactaagagtcagctatacagtgagggataaggaagacggaattggtataaaaaaggggcgggggcatgatgccccaggaacttcccatttgatatgtgggtcaacttccttggtctcctttatcagcttgctgtgaggatcaaataaactttatacatatgtatatacacatatattcaccatatatatatacgctgtgatagctgaaatggaccaaagttaccattattgctctgcagatccgtggagggaagctgatgatgtcacatacactcaagagcgatgcaggcatgtatgtgtgcgtagcctccaacatggcgggagaacgggagagtgcggcagctgaagtcatggtactgggtaggcacagggaattttgacattatgggaacaggtagcctgcagagtaagtagccgtgcagacaccctgactgttcactcactaccactccatagagcgtccctcattcctgcgcagaccagtgaatcaggtggtcctggctgatgcccctgtgactttcctatgtgaggtgaagggggatcccccacctcgtctacgctggcgcaaggaggatggggaactgcccacaggcaggtgagagacccccttctgcctgtaggaagacccaacctgatcaagagactattctgccctagaaaaccggaagacaggcacattctcacttgagaacacagagaagtctgttccctagagcctgtggccccagtcctatccagtccccacctccattgatgggtccatgggtaaccagcttctgtccctgctgggtcctgcctgtctttaagtaccttgaccctggtgtctgtcctgggggagagagaaagggtctgtagctgtggccaacccagcctggggtggggagtggagcaggtatgagatccggagtgaccacagcctttggattgggcatgtgagtgccgaagatgagggaacgtacacctgtgtggcggagaacagtgtgggccgcgctgaagcatctggctccctcagtgttcacggtgagggctgtacttgggactgcctgcagcaggaatggtaggaggggagaaggaggatggttggcaagagactgagggagaaagggcagagaagggcatgtggatggaacacctgagacttctgcaaggagtgggaggaggagaacactaaacaggccgggaggaagagatggatatctgctcctgtacacttgagctaagctggagcttctctctcctgttcctgcagtctcctttcttagtgcctctgactacctgttcctttttctcacctgcccttcccagtcccaccccagttggtgacccagccccaggaccagatggcagctcctggagagagcgtggctttccagtgcgagaccaaaggaaaccccccacctgccatcttctggcagaaggaggggagtcaggtgggtggccatctccaaggagcttcccatcagccttcctctgcggctcagcctccctccctctacattctgcaaacttctctctggggcttctgttttatctttgggagcccccagaaacccttgcaggttatttgagaggattaagtaagataatgaatataaaaggcctggaacacattgggacactttttaataaatgataataatacatttagatggtggagaacagtcctggatggtaggttcttagagaatctttctgttttgggcaaggctatcctgaggatgtaacaaattcagtttatctctcctcctttagaccccttgggctttggctttggacataacacactgctctggaaacagtattgaaccaaagctgctcagggtagaaaagtactcgctcttctatttataagagcaacaagggactttcacaaaggagagctcacagtcatcccttttgaaccttgcaaacaaatctcaaaatccagaagcagaatgaacattaactgaagttaccacataaataactctctctaaaggaagggtaggaattttgctactggaaacagggtcagcaagataaagtaagtatgatgagctccactctgttggaaaacaaggcaacctgctacctcattccaaatcgacagccacaattttctaacatcttttctagcacctgggactgctgaattctaattagattctcacatgaataaaaagggtgacggttagtaggggtgaagcaggtgttacccagggtctcagcatggtgccctttgtcctgagacccaaacctgcttccctgtctaatctaatggattatcttccatggatctatggaatgaaaactgttcaagcaggaagaagaggaatgtgtttaccacaacgtgttagaagactttcatatgattacttcatgtgatctttataactatcctctagaagtcaaatttgggaaattggggctcaggcaggttaaacagcttgttcagggtttccccactagtaagtcacggagctgggaagtagactctgaaattgtctaataaaattccctgatgtttttgtgaatacatttaactactttgcccaagttcacatcactgctggagacagacgatgaactagaatcataggaattctctgaattttgagattgacaggaatggggacctctccctgcccagctgcctgctcattccctaccctggttccttgctctgtccccaggtcctgcttttccccagtcagtcacttcagccgacggggcgcttctcagtgtctccaagaggccaacttaacatcaccgcggtgcagcgtggggatgctgggtactacgtgtgccaggctgtcagtgtggctggcagcatcctggccaaggccctgctggagataaaaggaggtacgtgcccatggagataggactggatccatggcttgggaggaaataatggcctaaagtgatgtgtttctcttggagtctatatactatgtctgcaagaggagagatgtgttcctgaggcatgaccttgaagtttggaaaccagcagcagaagccactaataatggctggtcctgggcagagacttcagatgattatcaaagccccctctgatcaccggaagtttcaggggctggggtagggagggtgaaggagcagagaatgaggacaaggggctgcccgcggggccctaagctcctcccctgaggtgcacacgttcttcctctctcagcctctttggatgggctgcctcctgtcatcctccagggaccagccaatcagacgctggtgcttggctcctccgtgtggctgccctgcagagtgactgggaaccctcaacccagtgtccgatggaagaaggatgggcagtggctgcagggggatgacctccagttcaagacaatggccaacggtaccctgtacatcgccaatgtgcaggtgagtgtcacccctggggccctagtagctgagaatggctatctgctccacgttccttacacaagtaagtactcactgggcctgtagccccatctttacccctctgttctctcagagcacctagtatccaacatcttcccatccttctgctacccgcctccaccccctcactggatcttgctccactctcagtttgccagtgctctgccctctcttccaggagatggacatgggcttctacagctgcgtggccaagagttccacaggggaagccacatggagcggctggcttaagatgcggggtgagttttttctttcttcccttattttgataataccttcctccaaacctgcttcaacaggtagtcgatacctcctcaaactccgggattaactttatgtcacaaatgccatggttacggtggtgaggatgagaaggacagtagtggtacccatgggaggcagatgtgagtaggggttcatatactatagcccactctgaccatcaccgcagctcagagctccatagctcccctggtaaggagacaggttacactaggattatcctttccctatctttctacttaaagattatctcccactgcagaagactggggagtatcaccagacccccctacagaacccagttcccctccgggggctccctctcagccagtggtcactgagatcaccaagaacagcattaccctgacctggaagcccaacccacaaactggggctgcagtcacgtcttatgtgatagaggccttcaggtatggagaaagttttgaatgcaaacctggagagttaaaaggaggggatcctatgcccttagggtctttgctattgtgaggtgggattctccagtaccctcttgcaaggggaagacataatggtcgttcatagagagtggatgagatggagtaggcaggttgggagttcctggcttagacaaccctgtcatctccttcttgttgtagcccagcagctggcaacacatggcgtactgtggcagatggcgtgcagctggagacacacacagtcagcggtctgcagcccaataccatctacctgtttctggttcgagcagtgggagcctggggcctcagtgagcccagccccgtctctgagcctgtccgtacacagggtaaggtcagagtccctgggctcatgagcatgaaatgtaacatcataaagcaaccctctcccccaaaaccatgacaccacggcagttcatacagttctttcctgctatgccaggtctatactggtggcccggcctggaataggagatcatgtttgcctctcacagaagagacaagggaggaggaaggcagggagaggggaggagggaagaaggaaagggagagaggtagtcattcattttggcagcttctgacttctgagccttttacccatagataataatatagattattaagactagaagggaccatggaggggccatcttcatcttagagatgaggaactgaggcctttaaaggatgcatgtgtaattatgctagctggacaccgaggcccatgtctggaagctattttcctgaccagtcccctcctgaccatggggtgtgctctggagtactaagtggagcagggcagaggtaggacacgagcacactctcagccctatctccctgtccctggtggcctctgctgaatgggttccttggtcaacagatagcagcccctctaggccagtggaggacccatggagaggccagcagggactggcggaagtggctgtgcgcctgcaggagcccatagtcctgggaccccggaccctgcaggtgtcctggactgtgagtgtggtatggggaggagattcagggtggggatgattatgaggcacatgagggcctccaagagtgagtatgggagagtgggaggtgagtggctggggaaggcggcatgagtgggaggaggggctgggcctggatggcctggagggcctgtatggccccagcctccccttctggtgtgccttgtcctgtctcccacaggtggatggcccagtccagctggtgcaaggtttccgggtgtcttggagggtagcaggccctgagggaggaagctggacaatgttggacctacagtccccaagccagcaaagtactgtgctaagaggactccctccagggacccaaatccagatcaaggtgcaagcccaaggccaggaggggctgggggctgaaagcctctctgtgaccaggagcattcctgaggagggtaaggagggccaccgaacagatggatggacaagagggaagaaggggtgggggtggaggtggaggggggatgaaaatttgcaggaggagagcagggtgagtgggtgggaaggaggaatggctctcagttccctaagatgttagaacagggagggggaatgttggggcaggaggggcagcttgcaatgactatttgtgtccttctcaccatgctccaccctggcccagcccccagtggccccccacagggagtggcggtggccttggggggtgatggcaacagcagtatcactgtgtcctgggaacctccactcccctcccagcaaaatggggtcatcacggaataccaggtagagggattgaggagggactggatgggagggccaggccgggagggagagggaggacctagtggctagaattagggtggaggaaatctattacaggtttggctttagggttggggatgagtttaggggagaagagagaggtttccaagtgttgtttccaggttgaattacatctgtataaggcttctctaccatttggagccttaagtttcccggtgaggctaagaatcccatttctgactctaaatccgggactcggcctccctagatctggtgcctgggcaatgagagccgctttcacctcaatcgatctgcagcaggctgggcacgctccgcaatgctccgaggactggtgcccggtctcctctatcgaaccctggtcgcggcggccaccagcgcaggcgtgggcgtgcccagtgccccagtgctggtgcagctgcgtgagtccacccgagggcagtgctgaggatcttgacgggggcggggcaagccccccactggggtagctgtgcctgccgggtcgggaatgaccctttcccagttccagggtttcgggcccctcctcccctcacttctctgacccccacagcgtccccgccggacctggagcccgggctggaggtgggcgcggggctggcggtgcggctggcgagggtgctgcgggagcccgccttcctcgcgggcagcggcgcagcctgcggggcgctgcttctcgggctctgcgccgccctctactggcgccggaaacagcgcaaagagctcagccactacacgggtgagctcccggcctcggagcggacggatccgggagggagccaggcggcccatggggaggggcaggggcttagccgctggcgagtgaggaccgggtcgggagaaaggggtcgcacctggagttcagcctcttgggtaggggcgggatacgtggggcgactcgaggagctgccaggactagggagggctgcgggccaagacggggcgggatctggatgacgtttgcctctaagacgccacgaggaggccaggctttgcaaccatctccataaagaaggggcaagttcgaggacggaaagcccactcaaagggcggggggcggggcctggcaagagggggtgtggccaggatcccaggcagtaaattgtgcggcggggtctggatggaaaggcggggcccgctgaaagaaggcgatccgagttctgctacttcctagtaagggacgtctctggagagattctgaggtgtttgaggtcagtggttttcaatcttggttggctacacataggaatcacttgaggggcttgagaaaaataccgacacctgagtcccacccccgagaaattctgatgaaatgggtccagggtgcagcctgagtggtggaactgggaccggggcctaggcgtggacaagtataggggtatttctgacccttctcctcatttcacctcttctttctcccacgggttcctttctggaagcctcttttgcctacacaccggcaggtaagccatctctgccccagtggggttcagaccccccgggacgggcccttctctcactcattcgccccctcattttccccagtgtccttcccgcactcagagggcctctctggagccagttccaggtaattctcttagcccatttcctcaggatgacctccaccgacaggccactcttcttccgccccgctgacgccccaggtggagggagcatggccacctcccaccccaacaccaccgccactgtcctgaaactcccgaatatcgccacctccctttcctttgctggcctcttcaggctctccgtccccaacgctcacctgctctccctcaggccacccatgggccttggccccgccccctactcatggctggcagattcgtggccccacccatctcgaagcccctcggcccaggaacccaggggaagctgctgccctagcaatcctgacccggacgacagatattacaacggtgaggagttctcattccctcacctggcttcagcgcacttctcccgacctactggggcaaaccgaagggcgcccgggagcccggtctctctgaggttggtcagtccctggggaggatgtgagctggggaagcctctcagacctacctccaccctggtttaggatgtaaggcttgtgtgggggaagaagttgatcccgtgggatttccctttgtcttccattctgttgtcctctatgtttctgtctctgcttccgggcctccctctttcttctctgcagaagcgggaatctccctgtatctagctcagacggccaggggcacggccgcccctggcgagggtcctgtctatagcaccattgacccagcgggggaggagctgcagaccttccatgggggcttcccccaacatccctcaggagatctgggtccctggagccagtacgctcctccagagtggagccagggggacagtggtatgactccaactcctgaaaccccgtttagccctgaccagggtatccccaaagaggatcctcctccctgaccctctggcacctagcccggcacttccttctgacctgtctcatctctggctctttcctgcctgttctccgggtgtccccatcctattctcctcaggagccaagggaggcaaagtgaagcttctggggaaacctgtgcagatgccctctctgaactggccagaagccctgcccccacctcctccttcttgtgaactgagctgcctagaagggccggaggaggagctggagggcaggtagagatgctccctgcttccaggcccacacacctgcggccagaccatgggctgctggggaggaaggggagggggcagcaggaaggccaacgggaaggtatggaagcagctgagccctttccttctctcctgcctctttgatcccagctcagagccagaggagtggtgcccgccaatgcctgagagaagtcacctgacggagcccagctccagtggagggtgcctggtcaccccatcccgaagggaaaccccctctcccacaccttcctatggacagcagtccacagccactcttacaccctcacctcctgaccctccccagcccccaactgacatgccccatctccatcagatgcccaggtagggaggtatatagtacctcactcattgcaagccctctatacgtatctactcagtagatgactgggtgggtggatggatggatgggtggatggatctggggtacagaggtctcagggctgtgtcagggtggaagtgtaatttgggcaggaatatggaggctgacaagatctctcatgcccattagactggctcttgctggagtggtcagcactctacctgagacatttcagatatggctctccttatgcttctctagcttgggaggacttacgggcggacgggttgtgtctcgtttatctgttaggttgattgtctagcacagtgccaggcacatagtaggcattcagtttttgtggagggaacagaggctgcggcctcctgtcattgcaggagggtgccccttgggccgagttcccctctcagtgtatcccagcccatgctgggcatccgtgaagcgaggcctgctggcttgggtgctggccctgcagcctcaccccacctcagccccagtcctgcccctagcacagccagcagtgccccaggtaagtctctacaacctccttttgccccccggctccctccagtgcttgcttccccttcacccttaggcctttttcctgatttttgcccttacccattcctcttcccgtctcctaacactgcaggcagaacctggcaggggaatggggagatgactcccccacttcaaggaccccgtgctcgattccggaagaaacccaaggctcttccctacaggagggagaacagtcctgggggtgaggggggatgcacctgggagatggtgacagtagtggcggggggataggcaggaaaccaagggtgcactctgggggctggaggagggaacaggtgaaccccaatcttgggctgttcattggcagcctcctggtgccagggaatgcaggtgagagaaagattagtgacaggagtggcaggaggctccgctgaaaacagctccctccccagacttgcccccaccacccttgccaccgccagaggaagaggcgagctgggccctagagctgagggcagcaggcagcatgtcctccctggagcgggagcgcagtggggagaggaaagcggtccaggccgtgcccctggcagcccagcgggtgctccacccagatggtaagcagggccagggcaggcaggagggctgctgccacaggagactgtgggctttgggactgggggctgatagtagaccagctcagccctccctttagttaggttcatgcatttgatccacatcaaactcccctgtctctctaactctctgagcacaatcccctgaagtcccaagttgtgttcattcccaggatggaagcccagataagaggactgggctctaggtgctctgtccccgctccccacaaggctccctctgattgggagctcccccgcagcgttctgagcacccatgatgtcaaggccatgtgccggtcactctgctgctcctcagccccaggctggctgagccctgtgcctgcccttcatcttcttccagagctgagcctgtggtcagggtggcagggtgggtgacagggaagttctgcttcctgcctgcacctggctacccttccctcttgtgctgcagaagaggcctggctcccatacagcagaccaagcttcctgtcccggggccagggcaccagcacatgttccacggccggcagcaactcttccaggggctccagcagctctaggggctcccggggccctggccggagccggagtcggagtcagagccggagccagagccaaaggccaggacagaaacgccgagaggtaggggccatagattgcagaaaaatgagggcagaggactagggaagggtggaccaaggcgtaatggaaaacaggaaggtgggcaagggcttgtggaggagtgtcaaaaggaggggatcgagagggtgagggggagggaggaatcctgtagaagtgacaaggggactgagcgtggtggctcatgcctgtaatcccagcactttgggagaccgagatgggcggatcccttgagctcaggagtttgagactagcctgggcaatatggtaaaatcccatctctacaaaaaatacaaaattagctgggcgtggtggtatgctcctgtagtcccagctactcagggggcttgaggtgggaggatagcttgagcctgggaggtcaaggctgcagtgagccatgatcacaccactgctctccagtctgggcgacagagtgagactctgtctcaaacaaacaaacagacaaacaaaacaaaagaaatgacaaggggtgaggacaagatgacacataatagaggagcctgggctcaccgtaggagaactgggttaggagagagaaagcctgagcccttcctggacttgtttgccctgggccagggttttacaaaacagcatctctctctctctccctaggaaccaagatgacccttgttggggcattgagaatatcatgagtgccacggggaaggggagtagggatgtcttttcccccccagcagtgatgagtggggctagctgaagcccattggtttccacgatttcaattggctgagaaggcagagagctagctcctccctttctttctttttccacctgagacttgtttataaaaaacaaaacaataaaaagagtctgatcaga

SEQ ID NO: 13817 - DNA, 4551 bp, Homo sapiens
tcgccaagcgtggttcagccactcccgcttaaacttggcaggagaggagacggaggtctctaggtggtccagaaagccggcctagaagtttgtgtcccgatccctctactaaccggcctgtctgtaggcatcttcctttgagacgaggaacgcggaacgtctgccaataaggacatattggatcctgcagagggagagggtaggcaggtggggactgagctccgcagagaagcataggagatggaacgaccagaggattctctttccctctggagcctcaatctctccccacaatttccctgtctgaacgctctgcgccaccccctgtccccagggtcaagggtaggaccggaggacgctatgccccgcatcgtggagcagccgccagatctgctggtctcccgaggcgagcccgccacgttgccctgccgcgctgaaggccgaccccgacccaacattgagtggtacaagaacggggcgcgtgtggccactgtgcgggaggatccgcgtgcgcaccgcctgctgctgcccagcggcgccctcttcttcccgcgcatcgtgcacgggcgccgcgcgcggccggacgaaggtgtctacacttgcgtggctcgcaactacctgggggcagcagcgagcagaaacgcctcgctggaagtggcagtcctccgtgatgatttccggcagtctcctggaaacgtggtggtggcagtgggggagccagcagtactggaatgcgtgcccccccgcggccacccggagccttccgtgtcctggaggaaggacggtgcaagactcaaggaagaggaaggaaggatcacgatccgtggagggaagctgatgatgtcacatacactcaagagcgatgcaggcatgtatgtgtgcgtagcctccaacatggcgggagaacgggagagtgcggcagctgaagtcatggtactggagcgtccctcattcctgcgcagaccagtgaatcaggtggtcctggctgatgcccctgtgactttcctatgtgaggtgaagggggatcccccacctcgtctacgctggcgcaaggaggatggggaactgcccacaggcaggtatgagatccggagtgaccacagcctttggattgggcatgtgagtgccgaagatgagggaacgtacacctgtgtggcggagaacagtgtgggccgcgctgaagcatctggctccctcagtgttcacgtcccaccccagttggtgacccagccccaggaccagatggcagctcctggagagagcgtggctttccagtgcgagaccaaaggaaaccccccacctgccatcttctggcagaaggaggggagtcaggtcctgcttttccccagtcagtcacttcagccgacggggcgcttctcagtgtctccaagaggccaacttaacatcaccgcggtgcagcgtggggatgctgggtactacgtgtgccaggctgtcagtgtggctggcagcatcctggccaaggccctgctggagataaaaggagcctctttggatgggctgcctcctgtcatcctccagggaccagccaatcagacgctggtgcttggctcctccgtgtggctgccctgcagagtgactgggaaccctcaacccagtgtccgatggaagaaggatgggcagtggctgcagggggatgacctccagttcaagacaatggccaacggtaccctgtacatcgccaatgtgcaggagatggacatgggcttctacagctgcgtggccaagagttccacaggggaagccacatggagcggctggcttaagatgcgggaagactggggagtatcaccagacccccctacagaacccagttcccctccgggggctccctctcagccagtggtcactgagatcaccaagaacagcattaccctgacctggaagcccaacccacaaactggggctgcagtcacgtcttatgtgatagaggccttcagcccagcagctggcaacacatggcgtactgtggcagatggcgtgcagctggagacacacacagtcagcggtctgcagcccaataccatctacctgtttctggttcgagcagtgggagcctggggcctcagtgagcccagccccgtctctgagcctgtccgtacacaggatagcagcccctctaggccagtggaggacccatggagaggccagcagggactggcggaagtggctgtgcgcctgcaggagcccatagtcctgggaccccggaccctgcaggtgtcctggactgtggatggcccagtccagctggtgcaaggtttccgggtgtcttggagggtagcaggccctgagggaggaagctggacaatgttggacctacagtccccaagccagcaaagtactgtgctaagaggactccctccagggacccaaatccagatcaaggtgcaagcccaaggccaggaggggctgggggctgaaagcctctctgtgaccaggagcattcctgaggaggcccccagtggccccccacagggagtggcggtggccttggggggtgatggcaacagcagtatcactgtgtcctgggaacctccactcccctcccagcaaaatggggtcatcacggaataccagatctggtgcctgggcaatgagagccgctttcacctcaatcgatctgcagcaggctgggcacgctccgcaatgctccgaggactggtgcccggtctcctctatcgaaccctggtcgcggcggccaccagcgcaggcgtgggcgtgcccagtgccccagtgctggtgcagctgccgtccccgccggacctggagcccgggctggaggtgggcgcggggctggcggtgcggctggcgagggtgctgcgggagcccgccttcctcgcgggcagcggcgcagcctgcggggcgctgcttctcgggctctgcgccgccctctactggcgccggaaacagcgcaaagagctcagccactacacggcctcttttgcctacacaccggcagtgtccttcccgcactcagagggcctctctggagccagttccaggccacccatgggccttggccccgccccctactcatggctggcagattcgtggccccacccatctcgaagcccctcggcccaggaacccaggggaagctgctgccctagcaatcctgacccggacgacagatattacaacgaagcgggaatctccctgtatctagctcagacggccaggggcacggccgcccctggcgagggtcctgtctatagcaccattgacccagcgggggaggagctgcagaccttccatgggggcttcccccaacatccctcaggagatctgggtccctggagccagtacgctcctccagagtggagccagggggacagtggagccaagggaggcaaagtgaagcttctggggaaacctgtgcagatgccctctctgaactggccagaagccctgcccccacctcctccttcttgtgaactgagctgcctagaagggccggaggaggagctggagggcagctcagagccagaggagtggtgcccgccaatgcctgagagaagtcacctgacggagcccagctccagtggagggtgcctggtcaccccatcccgaagggaaaccccctctcccacaccttcctatggacagcagtccacagccactcttacaccctcacctcctgaccctccccagcccccaactgacatgccccatctccatcagatgcccaggagggtgccccttgggccgagttcccctctcagtgtatcccagcccatgctgggcatccgtgaagcgaggcctgctggcttgggtgctggccctgcagcctcaccccacctcagccccagtcctgcccctagcacagccagcagtgccccaggcagaacctggcaggggaatggggagatgactcccccacttcaaggaccccgtgctcgattccggaagaaacccaaggctcttccctacaggagggagaacagtcctggggacttgcccccaccacccttgccaccgccagaggaagaggcgagctgggccctagagctgagggcagcaggcagcatgtcctccctggagcgggagcgcagtggggagaggaaagcggtccaggccgtgcccctggcagcccagcgggtgctccacccagatgaagaggcctggctcccatacagcagaccaagcttcctgtcccggggccagggcaccagcacatgttccacggccggcagcaactcttccaggggctccagcagctctaggggctcccggggccctggccggagccggagtcggagtcagagccggagccagagccaaaggccaggacagaaacgccgagaggaaccaagatgacccttgttggggcattgagaatatcatgagtgccacggggaaggggagtagggatgtcttttcccccccagcagtgatgagtggggctagctgaagcccattggtttccacgatttcaattggctgagaaggcagagagctagctcctccctttctttctttttccacctgagacttgtttataaaaaacaaaacaataaaaagagtctgatcaga

SEQ ID NO: 13818 - DNA, 4076 bp, Homo sapiens
ggagggagcatggccacctcccaccccaacaccaccgccactgtcctgaaactcccgaatatcgccacctccctttcctttgctggcctcttcaggctctccgtccccaacgctcacctgctctccctcaggccacccatgggccttggccccgccccctactcatggctggcagattcgtggccccacccatctcgaagcccctcggcccaggaacccaggggaagctgctgccctagcaatcctgacccggacgacagatattacaacggtgaggagttctcattccctcacctggcttcagcgcacttctcccgacctactggggcaaaccgaagggcgcccgggagcccggtctctctgaggttggtcagtccctggggaggatgtgagctggggaagcctctcagacctacctccaccctggtttaggatgtaaggcttgtgtgggggaagaagttgatcccgtgggatttccctttgtcttccattctgttgtcctctatgtttctgtctctgcttccgggcctccctctttcttctctgcagaagcgggaatctccctgtatctagctcagacggccaggggcacggccgcccctggcgagggtcctgtctatagcaccattgacccagcgggggaggagctgcagaccttccatgggggcttcccccaacatccctcaggagatctgggtccctggagccagtacgctcctccagagtggagccagggggacagtggtatgactccaactcctgaaaccccgtttagccctgaccagggtatccccaaagaggatcctcctccctgaccctctggcacctagcccggcacttccttctgacctgtctcatctctggctctttcctgcctgttctccgggtgtccccatcctattctcctcaggagccaagggaggcaaagtgaagcttctggggaaacctgtgcagatgccctctctgaactggccagaagccctgcccccacctcctccttcttgtgaactgagctgcctagaagggccggaggaggagctggagggcaggtagagatgctccctgcttccaggcccacacacctgcggccagaccatgggctgctggggaggaaggggagggggcagcaggaaggccaacgggaaggtatggaagcagctgagccctttccttctctcctgcctctttgatcccagctcagagccagaggagtggtgcccgccaatgcctgagagaagtcacctgacggagcccagctccagtggagggtgcctggtcaccccatcccgaagggaaaccccctctcccacaccttcctatggacagcagtccacagccactcttacaccctcacctcctgaccctccccagcccccaactgacatgccccatctccatcagatgcccaggtagggaggtatatagtacctcactcattgcaagccctctatacgtatctactcagtagatgactgggtgggtggatggatggatgggtggatggatctggggtacagaggtctcagggctgtgtcagggtggaagtgtaatttgggcaggaatatggaggctgacaagatctctcatgcccattagactggctcttgctggagtggtcagcactctacctgagacatttcagatatggctctccttatgcttctctagcttgggaggacttacgggcggacgggttgtgtctcgtttatctgttaggttgattgtctagcacagtgccaggcacatagtaggcattcagtttttgtggagggaacagaggctgcggcctcctgtcattgcaggagggtgccccttgggccgagttcccctctcagtgtatcccagcccatgctgggcatccgtgaagcgaggcctgctggcttgggtgctggccctgcagcctcaccccacctcagccccagtcctgcccctagcacagccagcagtgccccaggtaagtctctacaacctccttttgccccccggctccctccagtgcttgcttccccttcacccttaggcctttttcctgatttttgcccttacccattcctcttcccgtctcctaacactgcaggcagaacctggcaggggaatggggagatgactcccccacttcaaggaccccgtgctcgattccggaagaaacccaaggctcttccctacaggagggagaacagtcctgggggtgaggggggatgcacctgggagatggtgacagtagtggcggggggataggcaggaaaccaagggtgcactctgggggctggaggagggaacaggtgaaccccaatcttgggctgttcattggcagcctcctggtgccagggaatgcaggtgagagaaagattagtgacaggagtggcaggaggctccgctgaaaacagctccctccccagacttgcccccaccacccttgccaccgccagaggaagaggcgagctgggccctagagctgagggcagcaggcagcatgtcctccctggagcgggagcgcagtggggagaggaaagcggtccaggccgtgcccctggcagcccagcgggtgctccacccagatggtaagcagggccagggcaggcaggagggctgctgccacaggagactgtgggctttgggactgggggctgatagtagaccagctcagccctccctttagttaggttcatgcatttgatccacatcaaactcccctgtctctctaactctctgagcacaatcccctgaagtcccaagttgtgttcattcccaggatggaagcccagataagaggactgggctctaggtgctctgtccccgctccccacaaggctccctctgattgggagctcccccgcagcgttctgagcacccatgatgtcaaggccatgtgccggtcactctgctgctcctcagccccaggctggctgagccctgtgcctgcccttcatcttcttccagagctgagcctgtggtcagggtggcagggtgggtgacagggaagttctgcttcctgcctgcacctggctacccttccctcttgtgctgcagaagaggcctggctcccatacagcagaccaagcttcctgtcccggggccagggcaccagcacatgttccacggccggcagcaactcttccaggggctccagcagctctaggggctcccggggccctggccggagccggagtcggagtcagagccggagccagagccaaaggccaggacagaaacgccgagaggtaggggccatagattgcagaaaaatgagggcagaggactagggaagggtggaccaaggcgtaatggaaaacaggaaggtgggcaagggcttgtggaggagtgtcaaaaggaggggatcgagagggtgagggggagggaggaatcctgtagaagtgacaaggggactgagcgtggtggctcatgcctgtaatcccagcactttgggagaccgagatgggcggatcccttgagctcaggagtttgagactagcctgggcaatatggtaaaatcccatctctacaaaaaatacaaaattagctgggcgtggtggtatgctcctgtagtcccagctactcagggggcttgaggtgggaggatagcttgagcctgggaggtcaaggctgcagtgagccatgatcacaccactgctctccagtctgggcgacagagtgagactctgtctcaaacaaacaaacagacaaacaaaacaaaagaaatgacaaggggtgaggacaagatgacacataatagaggagcctgggctcaccgtaggagaactgggttaggagagagaaagcctgagcccttcctggacttgtttgccctgggccagggttttacaaaacagcatctctctctctctccctaggaaccaagatgacccttgttggggcattgagaatatcatgagtgccacggggaaggggagtagggatgtcttttcccccccagcagtgatgagtggggctagctgaagcccattggtttccacgatttcaattggctgagaaggcagagagctagctcctccctttctttctttttccacctgagacttgtttataaaaaacaaaacaataaaaagagtctgatc

SEQ ID NO: 13819 - DNA, 1520 bp, Homo sapiens
ggagggagcatggccacctcccaccccaacaccaccgccactgtcctgaaactcccgaatatcgccacctccctttcctttgctggcctcttcaggctctccgtccccaacgctcacctgctctccctcaggccacccatgggccttggccccgccccctactcatggctggcagattcgtggccccacccatctcgaagcccctcggcccaggaacccaggggaagctgctgccctagcaatcctgacccggacgacagatattacaacgaagcgggaatctccctgtatctagctcagacggccaggggcacggccgcccctggcgagggtcctgtctatagcaccattgacccagcgggggaggagctgcagaccttccatgggggcttcccccaacatccctcaggagatctgggtccctggagccagtacgctcctccagagtggagccagggggacagtgctcagagccagaggagtggtgcccgccaatgcctgagagaagtcacctgacggagcccagctccagtggagggtgcctggtcaccccatcccgaagggaaaccccctctcccacaccttcctatggacagcagtccacagccactcttacaccctcacctcctgaccctccccagcccccaactgacatgccccatctccatcagatgcccaggagggtgccccttgggccgagttcccctctcagtgtatcccagcccatgctgggcatccgtgaagcgaggcctgctggcttgggtgctggccctgcagcctcaccccacctcagccccagtcctgcccctagcacagccagcagtgccccaggcagaacctggcaggggaatggggagatgactcccccacttcaaggaccccgtgctcgattccggaagaaacccaaggctcttccctacaggagggagaacagtcctggggacttgcccccaccacccttgccaccgccagaggaagaggcgagctgggccctagagctgagggcagcaggcagcatgtcctccctggagcgggagcgcagtggggagaggaaagcggtccaggccgtgcccctggcagcccagcgggtgctccacccagatgaagaggcctggctcccatacagcagaccaagcttcctgtcccggggccagggcaccagcacatgttccacggccggcagcaactcttccaggggctccagcagctctaggggctcccggggccctggccggagccggagtcggagtcagagccggagccagagccaaaggccaggacagaaacgccgagaggaaccaagatgacccttgttggggcattgagaatatcatgagtgccacggggaaggggagtagggatgtcttttcccccccagcagtgatgagtggggctagctgaagcccattggtttccacgatttcaattggctgagaaggcagagagctagctcctccctttctttctttttccacctgagacttgtttataaaaaacaaaacaataaaaagagtctgatc

SEQ ID NO: 13820 - DNA, 2004 bp, Homo sapiens
agttggtaaatgacagttatgaataaagcaagggcagaaaaaaacatgtaggggagagaatgaggaactaggtccaggagatgctgaaactggataataaagacgtcatatcacaccccttggggtatccatctgagagcttgctttccattgccagcatgctggacagcagtgacagctccagtcagccccactggagcaacgagctcatagcggaacagctacagcagcaagtctctcagctgcaggatcagctggatgctgagctggaggacaagagaaaagttttacttgagctgtccagggagaaagcccaaaatgaggatctgaagcttgaagtcaccaacatacttcagaagcataaacaggaagtagagctcctccaaaatgcagccacaatttcccaacctcctgacaggcaatctgaaccagccactcacccagctgtattgcaagagaacactcagatcgagccaagtgaacccaaaaaccaagaagaaaagaaactgtcccaggtgctaaatgagttgcaagtatcacacgcagagaccacattggaactagaaaagaccagggacatgcttattctgcagcgcaaaatcaacgtgtgttatcaggaggaactggaggcaatgatgacaaaagctgacaatgataatagagatcacaaagaaaagctggagaggttgactcgactactagacctcaagaataaccgtatcaagcagctggaaggtattttaagaagccatgaccttccaacatctggtgattttaacctcactgaccctgcagagaaacccaacggatctattcaagtgcaactggattggaagtttccctacataccccctgagagcttcctgaaaccagaagctcagactaaggggaaggataccaaggacagttcaaagatctcatctgaagaggaaaaggcttcatttccttcccaggatcagatggcatctcctgaggttcccattgaagctggccagtatcgatctaagagaaaacctcctcatgggggagaaagaaaggagaaggagcaccaggttgtgagctactcaagaagaaaacatggcaaaagaataggtgttcaaggaaagaatagaatggagtatcttagccttaacatcttaaatggaaatacaccagagcaggtgaattacactgagtggaagttctcagagactaacagcttcataggtgatggctttaaaaatcagcacgaggaagaggaaatgacattatcccattcagcactgaaacagaaggaacctctacatcctgtaaatgacaaagaatcctctgaacaaggttctgaagtcagtgaagcacaaactaccgacagtgatgatgtcatagtgccacccatgtctcagaaatatcctaaggcagattcagagaagatgtgcattgaaattgtctccctggccttctacccagaggcagaagtgatgtctgatgagaacataaaacaggtgtatgtggagtacaaattctacgacctacccttgtcggagacagagactccagtgtccctaaggaagcctagggcaggagaagaaatccactttcactttagcaaggtaatagacctggacccacaggagcagcaaggccgaaggcggtttctgttcgacatgctgaatggacaagatcctgatcaaggacatttaaagtttacagtggtaagtgatcctctggatgaagaaaagaaagaatgtgaagaagtgggatatgcatatcttcaactgtggcagatcctggagtcaggaagagatattctagagcaagagctagacattgttagccctgaagatctggctaccccaataggaaggctgaaggtttcccttcaagcagctgctgtcctccatgctatttacaaggagatgactgaagatttgttttcatgaaggaacaagtgctattccaatctaaaagtctctgagggaaccatagtaaaaagtctcttataaagttagcttgctataacatgaa

SEQ ID NO: 13821 - DNA, 3940 bp, Homo sapiens
atgtcacatctggtggaccctacatcaggagacttgccagttagagacatagatgctatacctctggtgctaccagcctcaaaaggtaagaatatgaaaactcaaccacccttgagcaggatgaaccgggaggaattggaggacagtttctttcgacttcgcgaagatcacatgttggtgaaggagctttcttggaagcaacaggatgagatcaaaaggctgaggaccaccttgctgcggttgaccgctgctggccgggacctgcgggtcgcggaggaggcggcgccgctctcggagaccgcaaggcgcgggcagaaggcgggatggcggcagcgcctctccatgcaccagcgcccccagatgcaccgactgcaagggcatttccactgcgtcggccctgccagcccccgccgcgcccagcctcgcgtccaagtgggacacagacagctccacacagccggtgcaccggtgccggagaaacccaagagggggccaagggacaggctgagctacacagcccctccatcgtttaaggagcatgcgacaaatgaaaacagaggtgaagtagccagtaaacccagtgaacttgtttctggttctaacagcataatttctttcagcagtgtcataagtatggctaaacccattggtctatgcatgcctaacagtgcccacatcatggccagcaataccatgcaagtggaagagccacccaagtctcctgagaaaatgtggcctaaagatgaaaattttgaacagagaagctcattggagtgtgctcagaaggctgcagagcttcgagcttccattaaagagaaggtagagctgattcgacttaagaagctcttacatgaaagaaatgcttcattggttatgacaaaagcacaattaacagaagttcaagaggcatacgaaaccttgctccagaagaatcagggaatcctgagtgcagcccatgaggccctcctcaagcaagtgaatgagctcagggcagagctgaaggaagaaagcaagaaggctgtgagcttgaagagccaactggaagatgtgtctatcttgcagatgactctgaaggagtttcaggagagagttgaagatttggaaaaagaacgaaaattgctgaatgacaattatgacaaactcttagaaagcatgctggacagcagtgacagctccagtcagccccactggagcaacgagctcatagcggaacagctacagcagcaagtctctcagctgcaggatcagctggatgctgagctggaggacaagagaaaagttttacttgagctgtccagggagaaagcccaaaatgaggatctgaagcttgaagtcaccaacatacttcagaagcataaacaggaagtagagctcctccaaaatgcagccacaatttcccaacctcctgacaggcaatctgaaccagccactcacccagctgtattgcaagagaacactcagatcgagccaagtgaacccaaaaaccaagaagaaaagaaactgtcccaggtgctaaatgagttgcaagtatcacacgcagagaccacattggaactagaaaagaccagggacatgcttattctgcagcgcaaaatcaacgtgtgttatcaggaggaactggaggcaatgatgacaaaagctgacaatgataatagagatcacaaagaaaagctggagaggttgactcgactactagacctcaagaataaccgtatcaagcagctggaaggtattttaagaagccatgaccttccaacatctgaacagctcaaagatgttgcttatggcacccgaccgttgtcgttatgtttggaaacactgccagcccatggagatgaggataaagtggatatttctctgctgcatcagggtgagaatctttttgaactgcacatccaccaggccttcctgacatctgccgccctagctcaggctggagatacccaacctaccactttctgcacctattccttctatgactttgaaacccactgtaccccattatctgtggggccacagcccctctatgacttcacctcccagtatgtgatggagacagattcgcttttcttacactaccttcaagaggcttcagcccggcttgacatacaccaggccatggccagtgaacacagcactcttgctgcaggatggatttgctttgacagggtgctagagactgtggagaaagtccatggcttggccacactgattggagctggtggagaagagttcggggttctagagtactggatgaggctgcgtttccccataaaacccagcctacaggcgtgcaataaacgaaagaaagcccaggtctacctgtcaaccgatgtgcttggaggccggaaggcccaggaagaggagttcagatcggagtcttgggaacctcagaacgagctgtggattgaaatcaccaagtgctgtggcctccggagtcgatggctgggaactcaacccagtccatatgctgtgtaccgcttcttcaccttttctgaccatgacactgccatcattccagccagtaacaacccctactttagagaccaggctcgattcccagtgcttgtgacctctgacctggaccattatctgagacgggaggccttgtctatacatgtttttgatgatgaagacttagagcctggctcgtatcttggccgagcccgagtgcctttactgcctcttgcaaaaaatgaatctatcaaaggtgattttaacctcactgaccctgcagagaaacccaacggatctattcaagtgcaactggattggaagtttccctacataccccctgagagcttcctgaaaccagaagctcagactaaggggaaggataccaaggacagttcaaagatctcatctgaagaggaaaaggcttcatttccttcccaggatcagatggcatctcctgaggttcccattgaagctggccagtatcgatctaagagaaaacctcctcatgggggagaaagaaaggagaaggagcaccaggttgtgagctactcaagaagaaaacatggcaaaagaataggtgttcaaggaaagaatagaatggagtatcttagccttaacatcttaaatggaaatacaccagagcaggtgaattacactgagtggaagttctcagagactaacagcttcataggtgatggctttaaaaatcagcacgaggaagaggaaatgacattatcccattcagcactgaaacagaaggaacctctacatcctgtaaatgacaaagaatcctctgaacaaggttctgaagtcagtgaagcacaaactaccgacagtgatgatgtcatagtgccacccatgtctcagaaatatcctaaggcagattcagagaagatgtgcattgaaattgtctccctggccttctacccagaggcagaagtgatgtctgatgagaacataaaacaggtgtatgtggagtacaaattctacgacctacccttgtcggagacagagactccagtgtccctaaggaagcctagggcaggagaagaaatccactttcactttagcaaggtaatagacctggacccacaggagcagcaaggccgaaggcggtttctgttcgacatgctgaatggacaagatcctgatcaaggacatttaaagtttacagtggtaagtgatcctctggatgaagaaaagaaagaatgtgaagaagtgggatatgcatatcttcaactgtggcagatcctggagtcaggaagagatattctagagcaagagctagacattgttagccctgaagatctggctaccccaataggaaggctgaaggtttcccttcaagcagctgctgtcctccatgctatttacaaggagatgactgaagatttgttttcatgaaggaacaagtgctattccaatctaaaagtctctgagggaaccatagtaaaaagtctcttataaagttagcttgctataa

SEQ ID NO: 13822 - DNA, 5717 bp, Homo sapiens
gtattgcaagagaacactcagatcgaggtaagagcctctttaaacaaactagtccactctgcagagagatctctggcaaatatctctagggaagatgatgagattagaaaactaactaaataatattttgtcctgactgaggacactctttttttttttgagacagagtctcgctgtcgcccaggctggagtgcagtggcgcgatctcggctcactgcaggctccgccccctggggttcacgccgttctcctgcctcagccttccgagtagctgggactacaggcacccgccacctcgcccggttaatttttttgtatttttagtagagacggggtttcaccgtgttagccaggatggtctcgatctcctgacctcgtgatccgcccacctcggcctcccaaagtgctgggattacaggcgtaagccaccgcgcccggcccactctttttttttttttttttttttgagatggagttttgctcttgtttcccaggctggagtgcaatggcgcgatctcggctcactacagtctttgcctcccaggtttaagcaattctccttcctcagcctcccgagtagctgggattacaggtgcttgccaccacagccggctaattttttgtatttttagtagagacagggtttcgccattttggccaggctggtctcgaactcctgacctctggtgatccgcccaactcagcctcccaaagtgctgggattacaggcacgtgccactgtgccctgcttgaggacactttttggaaaactgtgagaaggcagagcgtagagaacttcatgagctccacccatttcttccactctttgcagctcataaaatttagaatctttttcagatgaggacttgaaaagatctgtggaagagcaaacagccattagtggctgtatcatctcccttcactgctgctactgaacatgagaactaggggaaagagcacttgtgaagtcatacaggtccttgtttacattttggagtagtttctgctgctggcattttactactaccaacaactgttttatggagaatcattattactttacctgtcatatttatactcccttttaccaatgcgtttccctctacagccaagtgaacccaaaaaccaagaagaaaagaaactgtcccaggtgctaaatgagttgcaagtatcacacgcagagaccacattggaactagaaaagaccagggacatgcttattctgcagcgcaaaatcaacgtgtgttatcaggtgcaaggaaagatggtacaggaaggggatggataacaggaacgtgggaaccactcacaggactgggaatgaagcaagacctaagtttccagggctgataccaggtgatgtgctatcctgagcaaacacacaatggctgtcctttgaagaacttgaggactcacacatgcccacggcaccttggcactaggagccagtgatggggccagcccatgccaatggcaagcgtaaggcttctgggttcaaattttgccagtcctaggaaccaccctacctcaatgatagcacaactagtcttggaggggtctgcaaggaaatcaaaccttcttctagtgggtgaacctgcccagctaaggatagcagtcttcttgacctagccagtgccacattttttatgctctttggttttaggccactgagatagaaaagttcagacattattttgtttcaggaggaactggaggcaatgatgacaaaagctgacaatgataatagagatcacaaagaaaagctggagaggttgactcgactactagacctcaagaataaccgtatcaagcagctggaaggtattttaagaagccatgaccttccaacatctggcaagtcttagtcctttgttctcctcacttcgggacccttccacagctaacgcctgtgttccactctgtgtacttgtcaagaagggtgcctctcatacccttagcatatgacttatccttcttgttctttatcctatcatttttgttgtttttttttgcttgtttgcttttgagatggagtcttgctctgtcactcaggctggagtgcagtggtgcgatcttggctcactgcaacctctgccttccaggttcaagcgattctcctgcctcagcctcccaagtagctgggatgacagttgtccaccaccatgcctggctaattttttgtatttttagtagagatggggtttcaccatgttggccaggttggtctggaacttctgacctcaggtgatccacctgcctcagcctcccaaagtgatgggattacaggtgcgagccactgcgcccggcccatctttgttgttttaatacatgttagcagcttctttccctccatcatgtttttctgatttctctgtagagtttcaagtgggcccagcaattgcttccaggggcttaattctgttgtgagaatgagtatcactgttggctctcagggtggtggtgtaacacacaatctctctctctctctctcattctttctctcttgctcctctcccctgtccctctctcctagtcactgtttcctcaaagcagttttagtcggataatagaacttcatcactcatctcctgttattcttgtcagtgatttctctcttaaaagctctaaaatctttgttgcaatttgaggatgctgacagtgacagggcagctggctggacactgaatgcaagtttcatattgtggtgcctcctatacttagtgtagtcactgctgaccagagcctggtctcaggcttgtttgtcaagacacttggctttgttattatacccagtggtgaaagatctgactcacgaaaaccaaattaaccagaagctgatatttaaacccaaatgtttgttattttacaatagtggctattccactgcttccatgaggaacttggaaccacagttcagggcagccctctttcgggaagcaaaatcagtaagtaggtttcttagtgagcatggaatagaataaagggacatggctgggcacggtggctcacacctgtaatcccagcactttgggaggacgaggcgggcggattgcctgaggtcaggagttcgagaccagcctgaccaacatggtgaaaccccatcgctactaaaaatagaacaattagctgggcatggtggcgggcacctgtaaccccagatacttaggaggctgagacaggagaatcgcttgaacccgggaggcaaagttgcagtgagccgagaccaggccattgcattccagcctaggcaacaagagcgaaactctgtctcaaaaagaaaaaaaaaaaagaataaaagcacataagtgtctctgggccgtgatttatccatgtcagcgtgagtctgataaaagatcactgcttctacctacgtctgaagatttatttgctttagctaatagttctttgatcactggtaagactaaagagtttttctatgttcaccagttatttgtattattccttttgagaattgaccgttcctatcctttgcctacttcttaacagtatcctattgatttatagaaattctttttatgctgagattattactcctgcatcatgtaatgcaaaattttaagtatattatatttaattatattaatcttgttaattaagaaagtagtctccttattcgtgtgtgtgtgtgtgtgtcatgaagacattccgatgtgtccagaatattttattctactgctttaactcttaaaataggaccttcggcagcagcacactgtgttgactcaaatattccccaatttgaagcaggctatatatcaaagtttctgattggttggacttgggagataatacccagatttgctagactgtctacctatctttgcgtcccactgccaatatttcctacctctttccagtaagtctcttttcccactttttactccattactctttaacttataatgtactttttgccttcttatgttgaaaccaaattctgaacagaatgaaagatctcctgactgacctggctagagaaggagaagcatttcttggtgggactcaatgtaatgtcatagacactatgtctgcaacttgctattatctccacggccaatataccaaacttgtagaaatattcatgtttttgtgtttctagtacttctcttatggaattaccagttaatcatagggccacgatgtacaccaaaacaatgtcatatataagataaaatgtgcccccagtgttttcctaagtttagcatctactttccagtcactccttttgtaccttctccctaaagctggcattggattatttggctatcggaattcaatgctcctggttgtccttctgttgcttttccttttgaatcacgtggtttcttgaaataatcacaacttggacttccaccatgtgttttatatttcttttgtccaccctcctctaccctaagaaagagctccctaccctttaacggataggcagctttctttcccctctagaacagctcaaagatgttgcttatggcacccgaccgttgtcgttatgtttggaaacactgccagcccatggagatgaggataaagtggatatttctctgctgcatcagggtgagaatctttttgaactgcacatccaccaggccttcctgacatctgccgccctagctcaggctggagatacccaacctaccactttctgcacctattccttctatgactttgaaacccactgtaccccattatctgtggggccacagcccctctatgacttcacctcccagtatgtgatggagacagattcgcttttcttacactaccttcaagaggcttcagcccggcttgacatacaccaggccatggccagtgaacacagcactcttgctgcaggatggatttgctttgacagggtgctagagactgtggagaaagtccatggcttggccacactgattggtaagtgccgttggcttcctgcggctcctaagcaccaatgcagaatttcccaaagcctacagttgcttttctggtggtttcttattttcttcctttgtcttgttcttgatccttgccacaccatctgtattccccctgctttcacactttctgctacccaggagctggtggagaagagttcggggttctagagtactggatgaggctgcgtttccccataaaacccagcctacaggcgtgcaataaacgaaagaaagcccaggtctacctgtcaaccgatgtgcttggaggccggaaggcccaggaagaggaggtgagaaaaaagatgtgccgaggcatctcagaggagcctcagccaaacagctcatgagcacagttcagtcttccactctcaataagtgtttgttgaatgtgaatgaaagagaaaactgtcacaccacaactagtctggattattcccttggtcaggcttgagtctgaaatgaaagtatgcctttggagcgagctacatccttcatccttgctgtgaacagaatagcttctctgtgccattctctaagttaagtcgtgagtgccagtatctccctgaaataactgccagagccagtttgcaggcaggtgaagatcattaggtttcttcctgatccagttgggatagctgttctctagatcatagctcttcctcaccacagatcctaggcttcacctacaacagtctcaagctgcccttttcctcaatccatgaccaacatctttccagttcagatcggagtcttgggaacctcagaacgagctgt

SEQ ID NO: 13823 - DNA, 585 bp, Homo sapiens
gtattgcaagagaacactcagatcgagccaagtgaacccaaaaaccaagaagaaaagaaactgtcccaggaggaactggaggcaatgatgacaaaagctgacaatgataatagagatcacaaagaaaagctggagaggttgactcgactactagacctcaagaataaccgtatcaagcagctggaaggtattttaagaagccatgaccttccaacatctgaacagctcaaagatgttgcttatggcacccgaccgttgtcgttatgtttggaaacactgccagcccatggagatgaggataaagtggatatttctctgctgcatcagggagctggtggagaagagttcggggttctagagtactggatgaggctgcgtttccccataaaacccagcctacaggcgtgcaataaacgaaagaaagcccaggtctacctgtcaaccgatgtgcttggaggccggaaggcccaggaagaggagatcctaggcttcacctacaacagtctcaagctgcccttttcctcaatccatgaccaacatctttccagttcagatcggagtcttgggaacctcagaacgagctgt

SEQ ID NO: 13824 - DNA, 27375 bp, Homo sapiens
atatcaaagtttctgattggttggacttgggagataatacccagatttgctagactgtctacctatctttgcgtcccactgccaatatttcctacctctttccagtaagtctcttttcccactttttactccattactctttaacttataatgtactttttgccttcttatgttgaaaccaaattctgaacagaatgaaagatctcctgactgacctggctagagaaggagaagcatttcttggtgggactcaatgtaatgtcatagacactatgtctgcaacttgctattatctccacggccaatataccaaacttgtagaaatattcatgtttttgtgtttctagtacttctcttatggaattaccagttaatcatagggccacgatgtacaccaaaacaatgtcatatataagataaaatgtgcccccagtgttttcctaagtttagcatctactttccagtcactccttttgtaccttctccctaaagctggcattggattatttggctatcggaattcaatgctcctggttgtccttctgttgcttttccttttgaatcacgtggtttcttgaaataatcacaacttggacttccaccatgtgttttatatttcttttgtccaccctcctctaccctaagaaagagctccctaccctttaacggataggcagctttctttcccctctagaacagctcaaagatgttgcttatggcacccgaccgttgtcgttatgtttggaaacactgccagcccatggagatgaggataaagtggatatttctctgctgcatcagggtgagaatctttttgaactgcacatccaccaggccttcctgacatctgccgccctagctcaggctggagatacccaacctaccactttctgcacctattccttctatgactttgaaacccactgtaccccattatctgtggggccacagcccctctatgacttcacctcccagtatgtgatggagacagattcgcttttcttacactaccttcaagaggcttcagcccggcttgacatacaccaggccatggccagtgaacacagcactcttgctgcaggatggatttgctttgacagggtgctagagactgtggagaaagtccatggcttggccacactgattggtaagtgccgttggcttcctgcggctcctaagcaccaatgcagaatttcccaaagcctacagttgcttttctggtggtttcttattttcttcctttgtcttgttcttgatccttgccacaccatctgtattccccctgctttcacactttctgctacccaggagctggtggagaagagttcggggttctagagtactggatgaggctgcgtttccccataaaacccagcctacaggcgtgcaataaacgaaagaaagcccaggtctacctgtcaaccgatgtgcttggaggccggaaggcccaggaagaggaggtgagaaaaaagatgtgccgaggcatctcagaggagcctcagccaaacagctcatgagcacagttcagtcttccactctcaataagtgtttgttgaatgtgaatgaaagagaaaactgtcacaccacaactagtctggattattcccttggtcaggcttgagtctgaaatgaaagtatgcctttggagcgagctacatccttcatccttgctgtgaacagaatagcttctctgtgccattctctaagttaagtcgtgagtgccagtatctccctgaaataactgccagagccagtttgcaggcaggtgaagatcattaggtttcttcctgatccagttgggatagctgttctctagatcatagctcttcctcaccacagatcctaggcttcacctacaacagtctcaagctgcccttttcctcaatccatgaccaacatctttccagttcagatcggagtcttgggaacctcagaacgagctgtggattgaaatcaccaagtgctgtggcctccggagtcgatggctgggaactcaacccagtccatatgctgtgtaccgcttcttcaccttttctgaccatgacactgccatcattccagccagtaacaacccctactttagagaccaggctcgattcccagtgcttgtgacctctgacctggaccattatctgagacgggaggccttgtctatacatgtttttgatgatgaagacttagagcctggctcgtatcttggccgagcccgagtgcctttactgcctcttgcaaaaaatgaatctatcaaaggtgggagttcgaggttattacatcttcacgccctcttcccagtgttgtctccctgtcctgattctacttttctttgattacttgcttgaaacagtctctcttaaaacctgaagataaaggatttagaatattgtcaagagcaacagagcagaagacttagagcctcactacttgtgtggaaacactggcttcttctgcttcttttcagccacaaagacaacattcctaagtgggtagagccagcaacctgaattctatacctctgtatctgaataaacttctttgttttttgagatggagtttcgctcttgttgcccaggctagtagctgggattacagacatgcgccaccacacccggctaatttttgtatttttagtagagatgggatttctccatgttggtcaggctggtcttcaactcccgacctcaggtgaacctcccacctgagcctcccaaagtgctgggattacagacgtgagccaccgcgcctggctgaacaaactttttcaagctctgtaatgctgtctagtatctgtctttactaaaggcctgttgtttcttagtgcatgactacatagatatctgattataaactgagaccttaacactcccccatcattctctcacttcttttaaacactggacacaagttagagagatttccacaccagatcatgacaaacacaaatttcttggattttttttttcctcccaatgtggagctgagctccatactgtctttcctaacttttatacctaggattgtgggggtgtaccaagaggggtcaactctttgactacagtcctgggagggtgaggtgggggtatccatgttttccttaggaagtggggatagctgcagtcagaaacaaccatatttaacaagattctggatgctccaggacatgtatgcagctctctcctcaatacaactgcttaaaaaaaggctgacacttctggacacaactcctttgccaaacaggggaggcagtataagccacctgttaatcagtgttacaaatcagacatctggcatttcgaaagagccattttgcttaagttttcttgggaccacttgagggtagaggtaacagttttcttggtacaactaaggcacagtaagcatttgataatagtaataataatgcagccttgttcattggctggatgactgatgacaagcaagctgtactccttttcatacacccttcactatctcttcctgaatcctagagataacccatcttccctgattaatattctaactgcactgctgtttgattttacttctgagtgtatcatcatcgtaattatttaatggatgttaattaattgctgataaaatatgttgaaattaaaaatgggaaggaagtagataaggtgctgacaaatgctcacttgcttatttcatgtgatcaggtcttattaatatctgtttgtttctcaggtgattttaacctcactgaccctgcagagaaacccaacggatctattcaagtgcaactggattggaagtttccctacataccccctgagagcttcctgaaaccagaagctcagactaaggggaaggataccaaggacagttcaaagatctcatctgaagaggaaaaggcttcatttccttcccaggtaactctccaggactccacaggtagcagatctctgccaatcctatggagcagatttgaaggagacagtattatagttgaagtaggtgcagtggctcacgcctgtaatcccagcactttgggaggccatggcaggcgaattacctgaggtcaggagttcaagaccagcctgaccaacatggggaaaccctgcctctactaaaaatacaaaaaattagctgggcgtggtggcacatgcctgtaatcccagctactgggaggctgaggcaggagaatcacttgaacctaggaggtggaggttgcggcgagccgagatcacgccattgcactctggcctgggcaacaagagcagaactctgtctcaaaaaaaaaaagaaaaagaaattccctctgtgagtgtcatgtgtcctgtgaacttaatatatatccctcataatgccatgagactactgatggagcgaaagcctgggttttactgcggaaaagagagagaaatagcatttctcagctccatgaggagagaaatgaagtctaacactagttcccaaatccctttcttgtgtttctaggttgttaaactaccagcttgtaatgctatctctgatctttctattcaggatcagatggcatctcctgaggttcccattgaagctggccagtatcgatctaagagaaaacctcctcatgggggagaaagaaaggagaaggagcaccaggttgtgagctactcaagaagaaaacatggcaaaagaataggtgttcaaggaaagaatagaatggagtatcttagccttaacatcttaaatggaaatacaccagaggtaagaccttaaaaactctgaagcactaaattgtgggttgtagtgtccccagatgtattattctcagaggtagaagcagaagcagaagcagacacacaagataagcactaatcggccgggcatggtggcttcggcctgtaatcccagcactttgggcagttgaggtgggcagatcacctcaggtcagcctggccaacacggtgaactcctatctctgctaaaaatacaaaatgaggcctggtgcagtggctcacgcctgtaatcccaacactttgggaggccgaggtgggtggatcacctgaggtcaggagttcgagaccagcttgaccaacatggtgaaaccctgtctctactaaaaatacaaaaattagccaggcatggtggtgtgtgcctgtaatcccagttactcgggaggctgaggaaggagaatcacctgaagctgggaggtggaggttgtggtgagctaagatcgcgccattgcactccagcctgagcaacaagtgagaaactccatctcaccaaaaaaaaaaaaaaaaaattagccaggcatggtggtatgtgcctgtaatcccagctactcagtcgggaggctgaggtaggagaatcgcttgaacccaggaggcggaggttgcagtgagctgagatcgtgccactgcattccagcctgggcgacagagcaagactccatctcaaaaaaataaaaataagataagccataatcatagctaattgtggctagcttgtgtttccacaaacacaagtagtttaacaaacccctggactgttcatttcaatgtaatttaattcagcatattatgtactctacagtttatgcttaaagttttaatactatatatatttttaaacaagtactcactttttttttttttttgagaccgagtcttgctctgtcgcccaggccagagtgcaatggcatgacctcggctcactgcaacctccgcctcccaggttcaagcaattctgctgcctcagcctcccaagtagctgggattacaggcacgtgccaccacacccagctaatttttgtatttttagtagagacgaggtttcaccatgttgatcaggctggtctcctgacctcaggtgatccgcctgcctcagcctcccaaagtgctgagattataggcgtgagccaccatgcccggccaacgagtactaacttttaaaaattaaaaagagccagtattgtctgggcatggtgactcacgcctataatcctagcactttgggaggctgaggcatgcggatcacatgaggtcaggagttcgagaccagcctggccaacatggtgaaaccccatctctactaaaaatagaaaaattagtcaggtgtggtgacgggctcctgtaatcccagctactcaggaggctgaggcaggagaattgcttgaacccaggaggcgaaggttgcagtgagccgagatggtgccactgcactctggcctgagtgacagagggagactctgtctcaaaaaaataataataataaaaattaaaaaaataaaaagagctaatatttaaaaagaaggcaggaaggaaggaatgaagaaagaaaaccaagatattaccagctatgtagtattgttgttcttattctgaagcaggtgaattacactgagtggaagttctcagagactaacagcttcataggtgatggctttaaaaatcagcacgaggaagaggaaatgacattatcccattcagcactgaaacagaaggaacctctacatcctgtaaatggtattgtcttttaaaatctattttttttcctagcactttgggaggccgaggtgggcagatcacgagatcaggctttcaagagcagcctggccaacatgatgaaacccgtctctactaaaaatacaaaaattagccgggtatggtggcaggcgcctgtaatcccagctacgtgggcggcggaggcaggagaattgcttgaacccaggaggaggaggttgcagtgagccgagattgcaccactgcactcctccagcctgggcgacagagcgagactccatctcaaaaaaaagaaaaaaatatatattttttctgtttaatcatttaattgttttgccaagctagttatttacttttctccttcaccttagaatgctaaagttttcatggaaaattagtatgtaagacctgaggcccagttttgtgttacaagtgtgatggttgggttaaccaaggctggaattcttaaataagtaactttctcagtgtttataaaatgttattttgccccaggatttttttgttttgttttgttttgtttttgagatggagtctcattctgtctcccaggctggagtgcaatggcaggatctcagctcactgcaagctctgcctcctgggttcaagcaattctcctgcctcagcctcccgagtagctgggattacaggtatgtgccaccatccccggctaattttgtatttttagtagagacaggttttctccatgttggtcaggctggtctcaaacttctgaccttaggtgatccgcccacctcagcctcccaaagtgctgggattacaggcgtgagccactgcacccgacctagttttgattttctcattaaaactgtttgttggctggttgtggtggctcatacctgtaatcccagcactttgggaggcatgggcgggtagatcacctgaggtcgggagtttgagaccagcctgaccaacatgatgaaaccccatctactaaaaatacaaaaaattagctgggcatggtggcatctgcctgtagtcccagctactggggaggctgaggcaggagaattgcttaaacccaggaggcagaggttgcagtgagctgagattataccactgcactccagcctgggcaacagagcaagactccgtctcagtacaaaaaacaaaaaacaggacagtgtttgtcttgattattgagtttttggcaccccttcaaattttatgcctaaggtcagtgcctcacatgccttcctctacttctgacagtggtcagaatagtggttactgctaggagaaggggaagagggttatcaggaaaggacaccctttgggcatctggagtgctaccagtgttctatttcttggctgaacggtgatagagatgttcattttacaacaatttaataagttgaacatttatatttcatgggcttttctatgtgcttgaaaaatttaataatgagaggaaaaatataaaggtagatatggaaatattatgaaaagagagtctttactacttaaaaaagctttttttctaaatctctagaagcattttatatatatataattttttttttttttttttttgagatgaagtctctctctgtcacccaggctggagtgcagtggcacaatctcggctcactgcaatctctgcctcccaggttcaagcgattctcctgcctcagcctccagagtagctgggactacaggtgtgccccactatgcccggctaatatttgtatttttagtagagactggatttcatcatgttgtccaggctggtctcgaactcttgacctcaagtgatccacctgcctcagcctcccaaagtgctgggattacaggtgtgagccaccacgcttggcctaaaagtataatttttaagcttttgaatgtatttggcataacttcttaaatgggaagagcataaatgatttttctcatgagaaggataatttttctattgattatgtaatctgatttctccgtcaaagtttactcaatgtaaggaaggttaacaagaataaccaagcccaaaatttcccagagccaaatttacatgactggcaagaaatcctggttataagagaacaattccattcttatgatttgcagacaatggaatattatttagtcataaaatagtagaataaatagtaacagtgtatctagatagcttcagtgtatccagacctgaatgcggggttccagttatctccatactcccaatttacatttcttcaggtatttgattgagtataatctatatccactagctttttctccttgtagaatgtgaaatatgggaccagaaggtaatctaaacctcatgtactatatggtcatctatttatagtcataaataataaaagaagactatttctgtggaagcctaattgttagttattgttttaatatcgctgttctccatgaatttcaaaagatcaagactggccaggcgcagtggcttacacctgtactcccagcagtttgggaggcagaggcaggcagatcacctgtcaggagcttgagactagcctggccaacatggtaaaaccccgcctctactaaaaatgcaaaaattagccaggtgtggtggtgggtgctggtaaccccatctgagaagctgaggcaggagaatcgcttgaacctgggaggcagaagttgcagtgagctgagaccatgccattgcactccagcctgggcaacaagagcaatgcttcatttcaaaacaaaaacaaaacaaaaacctcaaaagcaccagttagtactcgcaagaagctaaaatctgcctggtttcagatgtctgagtggagctatcaagcaggatgctgtagttgttgaaaaagaagcttattaatcttttagacaaagatctaagggtattaggtaaaggccatcaagaaatgaaaagggcctgattttaaggccatttccacatatgtagacaaagccttgtgtcttttagcagcctttgcttttgctgcccgctcagaccttttccctttgagacctcagtgaaacagacaacccaagactttgaaattttacagaagaggcacagcttgccatccagttatctaatgctatgtaacaatctactccaaaacttaatgacttaaaacaattgtcatttctttggctcactactcggcatgttaggcaggtctcatgaagaaggctcatttctcctctctcaatgtggcattagatggggtagctcagctagggggctgatgggttcatcttgcaagatagctcaccctactagctgatcaggtggtcctggctgtcagtggttgcttgggcttcctcacaggttggtagctgagttccaagacagcaaggtacaagtccatggcatttttgtgttctggccttagaagtcacatagcatcactcctaccgtactctttcagttgagacagtccaaaagatccaccttaattgaaggggaggggacaaagaccccaccactcaataggagcagcgtcaaggtcagtcgcattgtaaggagagcagctgagataggagagaccatttgaggccacctttttttttttttttttttgagacagagtctcttgtcgcccaggctggagtgcagtggctcgatcttggctcactgaaacctctgcctcccggattcaagcaactctcctgcctcagcctcccgagtggctgggaccacaggagtgtgccaccaagccaggctaattttgcatttttagtagagacggggcttcaccatgttggccaggctggtctaaaactcctgacctcaggtgatccacctgcctcgaactccaaaagtgctgggattacaggtgtgagccaccacgcccagccagagaggccatctttggaaaatacaatctgccccacccaattgcacagctttacctcaagcttggccattttcttcagcccccacaaaaggacttcctttcttccttccttactctcacccttccttcctgtcttccttcctttcttcctttctgtttttccttctttccctttctttttttgagaagtgaatcctgtatgtttggcaagcttctgaataagtgtacctttgaaaaagagggtttgattcttagtaagtgaaggcaaaatctagacactcggaactagtgaccagacagtggattggagatgtgtgtgctgggtcttttcttgggctaaagtgctttgaaacagttctataactgcaacctcttctctagcagacaaagaatcctctgaacaaggttctgaagtcagtgaagcacaaactaccgacagtgatgatgtcatagtgccacccatgtctcagaaatatcctaaggcagtaagtacactggagtaatcattgcatacgagataagacgataaataatgacagtggccagtcatgggggctcacgcctgtaatcccagcaccttgggaggccgaggcaggcagatcacctaaggtcgggagttcgagaccagcctgaccaacatggagaaaccccatctctactaaaaatacaaaaaaaattagccaggcatggtggagcgtccttgtaatcccagctactcaggaggctgaggcaggagaattgcttgaacccgggaggcagaggttgcagtgagccaagatcacgccattgcactccggcctgggcaacaagagcaaaactctgtctcaaaaaaaaaaaaaaaaaaaaaaaaagcaataatgacagtgtgcttagtggccacacaagtgaagggcaatccagttttaatgaagctgatggaaaatgcaaattgtttagttaaatttatgtttcgtgtgaatgaaggtcggctggtacagtcagataaaaggatcattttcttgagatagtgtaaatgatgacttgcttcaatacttctgtcctatctggatcctttgcctcttactcccatatcctccattgtgtcctgtaattcatgcccagcctgaatggtacccctgcctttaagtccatctaaggaaaacgggtttgctttgggagatggagtctggaagagaggacaggattcttcatgggagggctcatggagatcattccatttctgctgttttttactcaacctgtaattatctattaaacagttcagcctcaaagctctttcagaactgatttaagagacacgcatcaaaaaaatataaaaaagaaaaaaaagccggttgcggtggctcacgcctgtaatcccagcgctttgggaggccgagacgggtggatcacgaggtcaggagatcgagaccatcctggctaacacggtgaaaccccgtctctactaaaaatacaaaaaaattagccgggcgtggtggctggcacctgtagtcccagctactcgggaggctgaggcaggagaatggcgtgaacccaggaggcagagcttgcactccagcctgggcgacagagcgagactacgtctcaaaaaaaagagacacacatatattaataaatatccacacatatattcagtaatcattgtgttctaaccttgtgggttacacatgaggtagaaaacaattactcttaagtcgctgctgcctgacacatttgtaggtcctcaatatttgttgagtgagtgactgaataatagattcagagtgaattgatgattatgaacttcattagaaacattaaataagaatgtaggatgacctaaaaccaaggaggtagattgtgtaatataaagtctgttgtaagaaatcagaaaagggaatttatggtttcttttgtagaggttggaaaactcttccttgaaagctggaacatgtgcttgagaactgcaggaaaatgaaggatattggagtgaggagaaaaaactcaaagtcagtagacttaaacactgaatataacacatagttcaatttcagctgaggtgtggtggctcacacttgtaatcccagcactttgggaaactgaggcaggcagattgcttgaggccaggaatcaagaccagcctgagcaacacagcaagacaactgtctctacataaaatttaaaaactagctaggcgtgttggctcacatctgaagtcctaagtatttgggaggctgaggtgagaggattgcttgagcctgagagtttgaggctgcagtgagccatgatcttgccactgcactctagcttaggtgacagagagagaccctgtctcaaaaacaacagcaacgacaaaaccagttaagtttctctttgtctgaacttttatctatcatatctttttttagatattatgtagttatctgacaagtgtttgtaagacagactggagccacagaatgttggaattagataacacttctatattaccaaggtaaagaagattaaatgatgtgtacaggattattgagttagtgaaagagctgaaactccagttgaggtttttaaactgcgcaacctctcaagtaaccaaaaaaagcagccagctgatcagcaaactcatcttgaactgtaacaagccagccagatttcattaaaaacattacctaaattaaaggctcctaagtaagatatccttttagaaaacttccttgtgtgccccaaagtgttacttgagaaattaaatatgagaaaggagcctatctaagcaaaaaattagtgttattatcaagttaaacgtacaacacaggcacatatatattaaattattgttatattccaaaatgtccaggcatgaaaggtagagggggttgaaagctcagagtcaaaacttgagttctgtcactcttctgcctggggtcagctgggataaatggaaatgcagtagagtgtaatgtttaagagcatggagatttggttgagacagtgatttagatcccagctctgctacttaactagatatacagctttgagagagttttttaacctctattaggccttgtctccttatctgtaaaatggtagtattaagtatacccatctgatactgatgtggcaagattaaaataagggtttaatacagtgcccgagacaaattaagccctaaatgatagtgaggatgagtgtgatgataatagtagtctcatttctctgacctactggagttctcaatgttaagctttttttttttttttttgagatagagtcttgttctgttgcccaggctggagtgcgtgcagtggcgcaatctcggcttactgcaacctctgcctcccaggttcaagagattctcctgccacaggctcccgagtagctgggaccacaggtgtgtgtcaccacgaccagctaatttttgtatttttagtagagacggagtttcactatgttggccaggctggtctcaaactcctgacctcaggtgatccacccacctcggcctcccaaagtgctggaatttacaggtatgagccactgcgcccggcctaggttaagcatttttttttttttttttttttttttagagtctcgctctgtcacccaggctggagtgcagtggcaccatcttggctaactgcaacctccgcctcccgggttcaagcgactctcctgcctcagcttcccaagtagctgggactacagacacacgctgtcacgtccagctaatttttttgttttgagacctagtcttgctctgtcacccaggctagagtgcagtggtgcgatatcggctcactgcaacctccgccccccaggttcaagcaattctcctgtctcaccctcccgagtagctgggactacaggcgcacgccaccatgcctggctaattttttgtatttttagtagagatggggtttcaccgtgttagccaggatggtctcaatctcctgacctcgtgatctgcccgcctcggcctcccaaagtgccgggattacaggcgtgagccaccgctcctggcctccctcttcttaacagttactaatgaggagggagcaatcattttcatttgctctatggtcccagattactgtttctttagcaatagtgaatatcgagaacctcaaaattttttctcttatcgtgtcaatttcaggtgtcaggaatttcctgacccttatgtatgccaggtagtaagttttggcagccctgccccccagccaaattaggtggcacatctgagctaataagccaaagggtgttatctggcactaatccttgcagggtttctgccagcaagttcaaatgagttgatatatatttcaatggttaatattactaattgcatactttctttgctgttcagccccaataaaattacataatggaattagctcatgtaaagaaagtattctgaatccaacaaaaaatattagattgaaccatatattgtcatactcatagataaaaaatggttgacaattgtcagttctgtatagtccaacctaatatgaatgaataaaacatctgtgtgtacttggatcaaattttaatcttattcatcctcccatttcaccattgttaccagaataaacttgatgtagtctgcatgaatatggacttctgattattgtcccaggattattagcaagtttaaaaaatttgctgggtgtggtggctcacgcctgtaatcccagcactttgggaggtcgaggcgggcggatcacctgaggtcaggagttcgagacaagcctggccaacatggtgaaaccctgtctacaaaaatacaaaaattagccgggcgtgatgacgggtgcctgtaatcccagctactcaggaggttgaggcaggagaatcgcttgagcccaggaggtggaggttgcagtgagccaagattgcaccactgcactccagcctgggcgacagagcaagactctatctcaaaaaattgttttgttttgtttttttaactaggcaggtgtggtggctcacgcctgtaattctagcactttgggaggccgaggtgggctgatcatgaggtcaggagatcgagtccatcctggccaacatggtgaaaccccgtctctactaaaaatacaaaaattagctgggcgtggtggcgcgtgcttgtaatcctggctactcgaaaggcggagaaaggagaatggtttgaaccaaggagtcggaggttgcagtgagccgagatggttcccctgcactccagcctggtgacagagcgaaactcggtctcaaaaagaaaaaaaagaaaaataattttagatgtacaggaaggtgctatgtaatgtttatttagttttactcttttttcttcttttttggtaatgttatgaaacatgtatttttcaatcaataatgttttggggttctatccatgtcgatatatttagctttttatagttccttcgtcttaactgctgatcgatattgcattaaaataatacatgacctttcgtttagacagaactctaatgggtaatgattgagatttcatactgtgtgccaagtgcttgatattcatgactctctcgggcttcacagcagccttatgagttattctttccttcaagtaattatgaagtgcctgttttagtaactgccgggctctgtgggcacaaaatggtggataagacagacttggtctcttctctcttgaatcttacatactactgagggaaaatatgtacatcagtgagcaaataagtaaagcagatagctctgagattctaagtactatgaaggaaataaatagggcgatataatagcaatgcgaggagttgaactaggataggtgttgaggaaagatttctctgaggaggggacgtttgaactgaaatctgaagaacgagaagggaagagctacccatgtactgggtagactgtactcatctcaggcaaaggaattggtaagtgtaaaggccctgaggtaggaaagagtttgatttacctgaggagtgggaaatcaaaagaaaattaaagtttctcttgcacacatgtatattattattcccccaccccctttcaaaggaggacagtgaagtctagggagaagagcttgctcaagggaatatttaatacagttttactgagtgtatactgtgtgccagacattatgccaggcattgtgccaggcactagatactcggtagagactttaatggggccgggcgcaatggctcacgcctgtagtcccaacactttgggaggccgaggtgggtggatcacttgaggccaggagttcgagaccagcctgggcaacatggtgaaaccccgtctctactgaaaatataaaaattagtcgggcatggtggcacatgcctgtagtcccagctactcaggaggctggggcaggagaatcgcttgaacctgggagtcagaggttgcagtgagccgacgtcgcaccgttgcactccagcctgggcaacagtgctagactccatctctaaataaataaatacagattcccaggagccactctagacagtctgatataacacagaggcttttatacattttttatagcaatcactatgagaaatacatttctgcagtatccaatactcttataaaagaacaagtttcaagaaaccaggcttactattaacatttgccatgcattctcctattccactagatagtgtcttatcctgtctatcctatcctattgtttcttttttaaaaagctagtgaaacccgctaatctgacccatcaaagtgtcaaaaaaaaaccagatttttcaaaacactgtatagtcaatagttttcttgatgtttgggagagttggatgttatgggagggttattaagagaaaaacatcaaatatcgtttttttgtttgtttgtttgttttttgagacccagtctcactctgttgcccaggctggagtgcagtggcactgcaacctccacctcctaggttcaagtgattctcatgtcagcctcccgagtagctgggattacaggcatgagccaccatgcctggctaatttttgtatttttaatagagatgcggtttcaccatgttggccaggctggttttgaactcctgacctcaggtcaactgcccgcctcggcctcccaaaatgctggtattacaggtgtgagcctctgcaccccgccaaatatcttcatttttaagaagcaccccagatgattctgatgcagaatcattgagagatcttgcctgctgaatttcttaggggcaggcacaggagctccacttgctttctaagagaagaaaagatggggtaagagccggtctttggagaagtaagggcattggcctggccagctagtgaaaagaagcatacaggagggcactcacagatagaggggagagcgctatggctggtagggaaccatcctggattgactcattactggtgtcacgatactgacttgcctgccacactgtggaaggaggagacttctgttggccttggtgtacttctggaaacttcctcctggtatccctgatgccaacatggacacagggacaattaaaagaaaggacagggtgatggcagcgactgtgaagtgggattgaaaatattggagttcctggccaggcgcggcggctcacgactgtaatcccagcactttgggaggccgaggcgggtggatcacgaggtcaggagatcgagaccatcctggctaactaaaccccgtctctactaaaaatacaaaaaattagccgggtgtggtggcgggtgcctgtagtcccagctactcgggaggctgaggcaggagaatggcgggaacccgggaagaagagcttgctgtgagccgagatcgtgccactgcactccagcctgggcgacagagggagacactgtctcaaaaaaaaaaaaaaagactggagttcctgtgggagggcagggtggtctggtggcctcctcagtggcatgcacttgagtgggcatgggaagccctgggcagctctttgctatagtggctgaagcagctactgaatctccagtatcagtcaggaggtcttttaggtcctaacctcaggaaaatactagcttggttttcatgaagaacactgtggccagttgcagtggttcatgcctctcatctcagccactttgggaggctgaggtggacagattgcttgagtccaggagttctagaccatcgtgggcaacatagcaagaccatatctctattaaaaaaataaaaataattgtccctatgtggtggtgtacctgtggtcctagctacttgggtgactaaggtgggaagactgcttgagatcaggatgtcaaagctgcagtgaaccatgatcacacaactgccctccagcctgggcaacaaagcaagactctgtctcaaaaaaaaaaaaaaaagttgagaaatagctgtttagaaatttatttatttgtatataatcatcgggtacaagcacagttttgctgcatttatatattccactgtggtgaagcctggagcgacgcacattgttcccaccaagcaacctcccatcatccaccctccccgccgctccgaatcagacatttttttttattctttctatatgtggagatgactgagaaaggctgtcctggagaaatgatccactggactgtgagagagaagagctgggttctctttataaatttcctatcaattaactatggcaattaagtcaagttgtcttttgatgccagttttacctataaaaggattctcagggaataatatagtagatagattatacctatggttgatttctagagagtaccgtaatgggttaattggatggcgtataagcacttggagcctcactaacctttaggaactaaataaacattttccttatcaggattcagagaagatgtgcattgaaattgtctccctggccttctacccagaggcagaagtgatgtctgatgagaacataaaacaggtgtatgtggagtacaaattctacgacctacccttgtcggagacagagactccagtgtccctaaggaagcctagggcaggagaagaaatccactttcactttagcaagggtgaggcatcctgtgtggttactggggtgaggaagtctgatgaacattgagactgagggtcagaattactctggatttttgtggggtgaatccagccatttcactttattattttattgttcaaagtgttgtgtgcatgtggtttaaaaacatcgaatggggctaaacattttacatgaagcaggcctttgtcccagctcttcacagatcacttcgcctgttcccacccttcctcaatccacggcttcccacatttcagctatatttatttttactttttgaggtggagtctcgctctgttgcccaggctagaatgcagtggtgtgatcttggctcactgccacctctgactccgagattcaagcgattcacgtgactcagcctcccaagtagctgggattgcaggtgtgcgccaccgtgcctggctagttttttgtgtttttagtagaggcggggtttcaccattttggccaggctggtctcaaactcctgacctcaagtgatctgcctgccttggcctcccaaagtgctgggattataggcgtgagccaccaagcccatcctatctcagccatttcttctgttatttacttccatcatatttctgagtattgatttttgttcttcctcttttcctgtttttttttttttttttttttttttttttttttttttttttgagatggagtctgaacatgttgctcaggctggtttcaaactcctggactcaaatgattctcctgcctcagcctcctgagtagctggaattacaggcgtgagccaccatacctggcttctgagtaacatttctattgcaatctcctgattcaccggctttagacttcctatctcggaccttaaaagttagctcttttgcactacactcatgtccctttccttcccatcgtaattgtatcataatttttatttaaatccatttaaattggttctgttattatggatatgtaaatattaattcttgcagaaccaagtagtatgcaatgattatatttctttacacgtattttttgcagcaatttttcattcgccttattttcattatacatattgtaattattttcgtgtccttcaacagtcttcccaaattttgaaataatcaaacctgtcaaattatctactcatctatttttttcctgaagacctctctccatcctcttgttctgctctagcccactgtttcattattactgctgctcatggagaatacgatcaaattctctcctataccagatttcttatctcctggttatcctctaatttattttcttattttaatggatcatattttcagtagtttttaaagaaagggcatatcacaagtgaaaatttgagaaagtcgtgcatgaaatctttttttcctaccctcatatttgattcaagtgtggaaatctttttcattcagaatttcgaaggagcctgggtgcagtggctcatgcctgtaatcccagcactttgggaagccaaggcgggcagattacttgaggtcagaagttggagaccagcctggccaacgtggcaaaaccctgtctctactaaaaatacaaaaattagccgggcatggtggggtgcacctgtaatcccaactactcgggaggctgaggcaggagaatcgcttgaacttgggagatggagactgcggtgaaccaagatcacgccactgcactctagcctgacacagtaagaatctgtcacacacacacacacacaaatgattttcaaagcagttggtccatgttattctagatccaggcaaggagtctaatctttttatgaaaactaccatgaataccactaatgaaagtcttggggctcacactgcaacagtatatgattctttgcttttttctcttacccttaatacagtaatagacctggacccacaggagcagcaaggccgaaggcggtttctgttcgacatgctgaatggacaagatcctgatcaaggacagtaagcatctgctttccactttgaaacaaaggagatattgagacagaaattcaaaagtttgagtttggttttgtgctgatgctgaatattttaataacttttttgagttaatttactcttaatgaatttcctatgtacttgagtataatttatatttgtgactacctaatccattacctaatcttataggttatttatttatttatttatttatttattttcgagacagggtctcactctgtcgtccaggctagagtgcagtggtgcgatcttggctcactgcaacctccacctccccaggctcaagggattcttgtgcctctgcctcccaagtagctagggttataggcatgtgccaccatgcctggctaattttttgtgtttgtagtagagatagggttttgccgtgttgctcatgtctggtcttgaactcctgcgctcaagcgatctgccctcctcggcctcccagagtgctgggattacaggcgtgagccaccgtgtccagcccatagtcttataggtttagttcatttctcacccatgccagcctgatgggccctttttttgtagcagcagtttacttgaatattgacaatgcccaaatggaataacaaaaagtgttgacattcttcttttttttgagacagtgtctcactctgttgtccaggctggagtgcagtggtacaatcttggctcactgcaacctccacctcctgggttcaagcgattcttctgcctgagcctcccaagtagctgggatgacaggtgcacgccacttgcctggctaatttttgtatttttagtagagacagggttttgccatgttggccaggctgatcccaaccccaggtgatccttctgcctcagactcccaaagtgttgggattacaggcgtgagtgaccacacctggtcaacaggaattttttgatgttgacataactaagtgaattttagatctcctttaaagttttaggaaagctggttgtccttattattccaataatctgaagaaggcctcctttcagagtttccagataaaatgtgggacatacccaaaaaaaaattatttggtcgggtgcagtggctcacatctgtaatcccagcactttgggaggctgaggcgggcagatcacttgaggccaggagtttgagaccagcctggccgacatggtgaaaccccatctctactaaaaacacaaaaaaatcagctaggcatggtggcacatgctggtaattctagctactcaggaggctgaggcatgagaatcatttgaatttgggaggcggaggttgcagtgagctaagattgtgccactgcactccaacctgggtgacaaagcagactctgcctctaaggaaaaaaaaaagttatttgttgtttagctgaaattcaaatttaaataggcatatggtttttgtttttgaaatctgttatccataccgcctgtgcatgtgtgtgcataagaaataatatggggctggtgttttatcttatttttaatttttttgtttgtttgttttagagacaggatctcactatgttgcccagctggtctttcagctcctgggctgaagcagtcctcctgccctgcctcccaaagtgctgggattataggcatgagccactgtgcccgacctggtgttttaattactttttgaaaggcccaatacttttgtttcatctgcttttactttgtctttggttagtcatagaaagaactgaaaaaggagccagatgaaataaacagtgactctgacttcagcatcactgtgggcttaaacagatgtaagcttacagagaacttttggacatggaaagtgatttggttctttcctttctgtgctaatgtcaaatttagctttcacttttttttccccagcatttccagaactctctcttcctttattcccttacagtgataatcattttctactcaattttagattcgattggtattacctttggctttctttttgccagtatggtctagcagacagagcaggctttgtaatcagaccaaccttgtttttattccagactctttgacttactagctctttgatctttttgatattacttaatttgaaggctcttgtgagaataaaattgagctaatatagtttacataaagcacttggtattgtgcccggcacattgtaatgctagttatcatccctttcctatgcaaattgggatgagggagtcagcattatcacttcgcattgttgaagttctcaataatgacatagaaacatagttacaaatgaatattgcctaatgggctgagaatggatccctttaaagtaattcctttgtttcagtttaatcatatttagctgtgcttttaaaagcttgaatttttagtcctattcctggcactctgtattagctaccaatatttgcttttaaaaattaataaaaatatgaaaaatcaagaataggcaaatccagagagatagaaagtagattagtggttcaggagctagggaaggagaatggggagtgactgcttaatcagtacagggtttctttttcttttttcttttagagactgggtctcgttctgtcacccaggttgaagtgcagtggcatgaacacagcccactgcatcctcgacctcctgggctcaagtgatctcacctcagccttccaagtagctgggactataggtgtgtgccaccatgcccggctaattttttattttttttgtagagacggggtgttcctatgttacccaggctggtcttgaactcatgggcacatcccatgatgttccctcttctaaaaggactgttactgcttaaattataccaattcctgacttttttgcttattgtcattttgtaaaatggaggcaagggaaaagtgattcagagaagacgttgtattgtttatgattacttttatccttattttatttttgaagcattaagagtatcaacagtgctgaattaaatgcaatttctttttagtttaaagtttacagtggtaagtgatcctctggatgaagaaaagaaagaatgtgaagaagtgggatatgcatatcttcaactgtggcagatcctggagtcaggaagagatattctagagcaagagctagacagtgagtcatttttttttcagttctaattatttccaaggaaatcatcctaatagtgaatatattttatcttcaatacataattattactatgaagttgataagacacaaagtggattgaaatcttatccctacaactgtatttatttctggatccaacattaaagtagtcagttgtgtatttttacccccatatacctgattacaactagaattgattttgaatctacaatgtttgaaaaggagatttttaaaaagacaagttattttcatttcaaatttatacatcagaattttggacctctcttgagcattttcgtataggcagctgatgcccattctttatgttatcatgcatccagtcttttttttttttttttttttgagatggagcctcactctgtcgcccaggctggagtgcagtggtgtgatctcagctcactgcaacctctgcctcccaggttccagctgttctcctgcctcagcttcctgcctcagcttccatggtgtgccaccatgcctggctaatttttgtatttttagtagagaccgtgttttaccatgttggccagactggtctcgaactcctgacctcaagtgatctgcttgccttggcctcccaaagtgctgggattgcaggtgtgagccactgcacctggcccatcttgtctcttaaaaagacattaactgtctcctctttcctcacattcactggtcattaagtcttatccattctacttgtgaattgactatgctctccttactacaattttttttttttttttttttgagacagagtctctctctgttgcccaggctggagtgcagtggtgtgatctcggctcactgcaacctccacctcccaggttaaagcgattctcctgcctcaacctcctgggtagctgggactacaggcacctgccaccacgccagctaatttttgtatttttagtagagacgggctttcaccatgttgcccaggctggtctcgaactcttggactcaagcaatccaccctcttttgcctcccaaagtgttggcattacaggcataaaccactgcgcccggcctccttaaatataattactataatttctttcttttttttttttttttttgagatggagtcttgctcttgttgcccaggctggagtgcaatggaccgatctcagctcaccacaacctctgcctctttcttaatcaagcgattttcctgcctcagcctccctagtagctgggattacaggcatgaaccaccacgcccagctaattttgtatatttagtagagatggggtttcttcatgttggtcaggctggtctcgaactcccaacctcatgtgattcgccctccactcagcctcccaaagtgctgggattacaggcgtgagccaccgcgcccagccatataatttctaaactggtcttcctgccaccggtttcttctaccccatttccatctactatagtaaatacataatacatttgatcactgccttcttcttaaatccttttacagtttgctatagatcagcatgttttaaaaacatttgtatttgagtacctttagttgggactgcgctgtccagtcttcactgttcccattaccttacatagctgggatgtcacctatcttatctgctaggaccttcagacacttaagattatccactagatcaatgtttttcaaacttccagacacacaccccattagtggatgtgaaactgaattagtaaatcacaaggaaatttgaaaaatgcaaaccaaaactgtgggaaagaaaacaggaattaaaggccaggcgaggtggctcatgcctgtaatcccagcactttgggatgccgagatgggcggatcacctgaggtcaggagttcgagaccagcctggccaatatggtgaaaccccatctctactaaaaatacaaaaaaaattagccaggcatggcggcggacacctgtaatcccagctactcggaaggatgaggcagaattgcttgaacccgggaggcggaggttgcagtgagctgagatcaagtcaccgcactccagcctgggtgacagaacaagactctgtctccaaaaaaaaaaaaaaaaaaaagaaaacaggaattaagagtacatagcacatattgtcttgtgaaacttgttttatgtattgtttaatgaatcatggtataaaattattcttactgatcattataaacattttttgaggaatactcctcagaccctaaggtttacaaagttcaaatgttagataagattctaattatattcctctagtatctttccaactgtgatccttagtctttttcctcatctataaaacgggaataacagcagtctctatcttactgagttgtgaagattaaggaagcacttaaataagggattaaggggcttagggtagtgcctggcataaggcaagtgacgttatctttgtgggctattttccaactcactcctatccccattcctaaacatgctatgttcttcctgacctccatgccatttgtatgtgcacagggaaaatccacttaagacttttctggtgatttctccagaaatcctttccaatttgtccattctggtgcagatgcctcgttatgtccccaaagcaacttgtgcttccatttattatatagcacctatacactataccattttcctttctccttcactagattgagtcctcttatgaaatgggtaatttcattcatttagcatccccagtacctaacctgacaaataccaagtatcaaagtgttcaactgagtgatgctgtttttttccctttcccaacagttgttagccctgaagatctggctaccccaataggaaggctgaaggtttcccttcaagcagctgctgtcctccatgctatttacaaggagatgactgaagatttgttttcatgaaggaacaagtgctattccaatctaaaagtctctgagggaaccatagtaaaaagtctcttataaagttagcttgctataacat

SEQ ID NO: 13825 - DNA, 2875 bp, Homo sapiens
atatcaaagtttctgattggttggacttgggagataatacccagatttgctagactgtctacctatctttgcgtcccactgccaatatttcctacctctttccagtaagtctcttttcccactttttactccattactctttaacttataatgtactttttgccttcttatgttgaaaccaaattctgaacagaatgaaagatctcctgactgacctggctagagaaggagaagcatttcttggtgggactcaatgtaatgtcatagacactatgtctgcaacttgctattatctccacggccaatataccaaacttgtagaaatattcatgtttttgtgtttctagtacttctcttatggaattaccagttaatcatagggccacgatgtacaccaaaacaatgtcatatataagataaaatgtgcccccagtgttttcctaagtttagcatctactttccagtcactccttttgtaccttctccctaaagctggcattggattatttggctatcggaattcaatgctcctggttgtccttctgttgcttttccttttgaatcacgtggtttcttgaaataatcacaacttggacttccaccatgtgttttatatttcttttgtccaccctcctctaccctaagaaagagctccctaccctttaacggataggcagctttctttcccctctagaacagctcaaagatgttgcttatggcacccgaccgttgtcgttatgtttggaaacactgccagcccatggagatgaggataaagtggatatttctctgctgcatcagggtgagaatctttttgaactgcacatccaccaggccttcctgacatctgccgccctagctcaggctggagatacccaacctaccactttctgcacctattccttctatgactttgaaacccactgtaccccattatctgtggggccacagcccctctatgacttcacctcccagtatgtgatggagacagattcgcttttcttacactaccttcaagaggcttcagcccggcttgacatacaccaggccatggccagtgaacacagcactcttgctgcaggatggatttgctttgacagggtgctagagactgtggagaaagtccatggcttggccacactgattggagctggtggagaagagttcggggttctagagtactggatgaggctgcgtttccccataaaacccagcctacaggcgtgcaataaacgaaagaaagcccaggtctacctgtcaaccgatgtgcttggaggccggaaggcccaggaagaggagttcagatcggagtcttgggaacctcagaacgagctgtggattgaaatcaccaagtgctgtggcctccggagtcgatggctgggaactcaacccagtccatatgctgtgtaccgcttcttcaccttttctgaccatgacactgccatcattccagccagtaacaacccctactttagagaccaggctcgattcccagtgcttgtgacctctgacctggaccattatctgagacgggaggccttgtctatacatgtttttgatgatgaagacttagagcctggctcgtatcttggccgagcccgagtgcctttactgcctcttgcaaaaaatgaatctatcaaaggtgattttaacctcactgaccctgcagagaaacccaacggatctattcaagtgcaactggattggaagtttccctacataccccctgagagcttcctgaaaccagaagctcagactaaggggaaggataccaaggacagttcaaagatctcatctgaagaggaaaaggcttcatttccttcccaggatcagatggcatctcctgaggttcccattgaagctggccagtatcgatctaagagaaaacctcctcatgggggagaaagaaaggagaaggagcaccaggttgtgagctactcaagaagaaaacatggcaaaagaataggtgttcaaggaaagaatagaatggagtatcttagccttaacatcttaaatggaaatacaccagagcaggtgaattacactgagtggaagttctcagagactaacagcttcataggtgatggctttaaaaatcagcacgaggaagaggaaatgacattatcccattcagcactgaaacagaaggaacctctacatcctgtaaatgacaaagaatcctctgaacaaggttctgaagtcagtgaagcacaaactaccgacagtgatgatgtcatagtgccacccatgtctcagaaatatcctaaggcagattcagagaagatgtgcattgaaattgtctccctggccttctacccagaggcagaagtgatgtctgatgagaacataaaacaggtgtatgtggagtacaaattctacgacctacccttgtcggagacagagactccagtgtccctaaggaagcctagggcaggagaagaaatccactttcactttagcaaggtaatagacctggacccacaggagcagcaaggccgaaggcggtttctgttcgacatgctgaatggacaagatcctgatcaaggacatttaaagtttacagtggtaagtgatcctctggatgaagaaaagaaagaatgtgaagaagtgggatatgcatatcttcaactgtggcagatcctggagtcaggaagagatattctagagcaagagctagacattgttagccctgaagatctggctaccccaataggaaggctgaaggtttcccttcaagcagctgctgtcctccatgctatttacaaggagatgactgaagatttgttttcatgaaggaacaagtgctattccaatctaaaagtctctgagggaaccatagtaaaaagtctcttataaagttagcttgctataacat

SEQ ID NO: 13826 - DNA, 3526 bp, Homo sapiens
ctgcagcgcaaaatcaacgtgtgttatcaggtgcaaggaaagatggtacaggaaggggatggataacaggaacgtgggaaccactcacaggactgggaatgaagcaagacctaagtttccagggctgataccaggtgatgtgctatcctgagcaaacacacaatggctgtcctttgaagaacttgaggactcacacatgcccacggcaccttggcactaggagccagtgatggggccagcccatgccaatggcaagcgtaaggcttctgggttcaaattttgccagtcctaggaaccaccctacctcaatgatagcacaactagtcttggaggggtctgcaaggaaatcaaaccttcttctagtgggtgaacctgcccagctaaggatagcagtcttcttgacctagccagtgccacattttttatgctctttggttttaggccactgagatagaaaagttcagacattattttgtttcaggaggaactggaggcaatgatgacaaaagctgacaatgataatagagatcacaaagaaaagctggagaggttgactcgactactagacctcaagaataaccgtatcaagcagctggaaggtattttaagaagccatgaccttccaacatctggcaagtcttagtcctttgttctcctcacttcgggacccttccacagctaacgcctgtgttccactctgtgtacttgtcaagaagggtgcctctcatacccttagcatatgacttatccttcttgttctttatcctatcatttttgttgtttttttttgcttgtttgcttttgagatggagtcttgctctgtcactcaggctggagtgcagtggtgcgatcttggctcactgcaacctctgccttccaggttcaagcgattctcctgcctcagcctcccaagtagctgggatgacagttgtccaccaccatgcctggctaattttttgtatttttagtagagatggggtttcaccatgttggccaggttggtctggaacttctgacctcaggtgatccacctgcctcagcctcccaaagtgatgggattacaggtgcgagccactgcgcccggcccatctttgttgttttaatacatgttagcagcttctttccctccatcatgtttttctgatttctctgtagagtttcaagtgggcccagcaattgcttccaggggcttaattctgttgtgagaatgagtatcactgttggctctcagggtggtggtgtaacacacaatctctctctctctctctcattctttctctcttgctcctctcccctgtccctctctcctagtcactgtttcctcaaagcagttttagtcggataatagaacttcatcactcatctcctgttattcttgtcagtgatttctctcttaaaagctctaaaatctttgttgcaatttgaggatgctgacagtgacagggcagctggctggacactgaatgcaagtttcatattgtggtgcctcctatacttagtgtagtcactgctgaccagagcctggtctcaggcttgtttgtcaagacacttggctttgttattatacccagtggtgaaagatctgactcacgaaaaccaaattaaccagaagctgatatttaaacccaaatgtttgttattttacaatagtggctattccactgcttccatgaggaacttggaaccacagttcagggcagccctctttcgggaagcaaaatcagtaagtaggtttcttagtgagcatggaatagaataaagggacatggctgggcacggtggctcacacctgtaatcccagcactttgggaggacgaggcgggcggattgcctgaggtcaggagttcgagaccagcctgaccaacatggtgaaaccccatcgctactaaaaatagaacaattagctgggcatggtggcgggcacctgtaaccccagatacttaggaggctgagacaggagaatcgcttgaacccgggaggcaaagttgcagtgagccgagaccaggccattgcattccagcctaggcaacaagagcgaaactctgtctcaaaaagaaaaaaaaaaaagaataaaagcacataagtgtctctgggccgtgatttatccatgtcagcgtgagtctgataaaagatcactgcttctacctacgtctgaagatttatttgctttagctaatagttctttgatcactggtaagactaaagagtttttctatgttcaccagttatttgtattattccttttgagaattgaccgttcctatcctttgcctacttcttaacagtatcctattgatttatagaaattctttttatgctgagattattactcctgcatcatgtaatgcaaaattttaagtatattatatttaattatattaatcttgttaattaagaaagtagtctccttattcgtgtgtgtgtgtgtgtgtcatgaagacattccgatgtgtccagaatattttattctactgctttaactcttaaaataggaccttcggcagcagcacactgtgttgactcaaatattccccaatttgaagcaggctatatatcaaagtttctgattggttggacttgggagataatacccagatttgctagactgtctacctatctttgcgtcccactgccaatatttcctacctctttccagtaagtctcttttcccactttttactccattactctttaacttataatgtactttttgccttcttatgttgaaaccaaattctgaacagaatgaaagatctcctgactgacctggctagagaaggagaagcatttcttggtgggactcaatgtaatgtcatagacactatgtctgcaacttgctattatctccacggccaatataccaaacttgtagaaatattcatgtttttgtgtttctagtacttctcttatggaattaccagttaatcatagggccacgatgtacaccaaaacaatgtcatatataagataaaatgtgcccccagtgttttcctaagtttagcatctactttccagtcactccttttgtaccttctccctaaagctggcattggattatttggctatcggaattcaatgctcctggttgtccttctgttgcttttccttttgaatcacgtggtttcttgaaataatcacaacttggacttccaccatgtgttttatatttcttttgtccaccctcctctaccctaagaaagagctccctaccctttaacggataggcagctttctttcccctctagaacagctcaaagatgttgcttatggcacccgaccgttgtcgttatgtttggaaacactgccagcccatggagatgaggataaagtggatatttctctgctgcatcagggtgagaatctttttgaactgcacatccaccaggccttcctgacatctgccgccctagctcaggctggagatacccaacctaccactttctgcacctattccttctatgactttgaaacccactgtaccccattatctgtggggccacagcccctctatgacttcacctcccag

SEQ ID NO: 13827 - DNA, 429 bp, Homo sapiens
ctgcagcgcaaaatcaacgtgtgttatcaggaggaactggaggcaatgatgacaaaagctgacaatgataatagagatcacaaagaaaagctggagaggttgactcgactactagacctcaagaataaccgtatcaagcagctggaagaacagctcaaagatgttgcttatggcacccgaccgttgtcgttatgtttggaaacactgccagcccatggagatgaggataaagtggatatttctctgctgcatcagggtgagaatctttttgaactgcacatccaccaggccttcctgacatctgccgccctagctcaggctggagatacccaacctaccactttctgcacctattccttctatgactttgaaacccactgtaccccattatctgtggggccacagcccctctatgacttcacctcccag

SEQ ID NO: 13828 - DNA, 1821 bp, Homo sapiens
cagcccccgccgcgcccagcctcgcgtccaagtgggacacagacagctccacacagccggtgcaccggtgccggagaaacccaagaggggtgagatttaaggctacatcccctacagggctaagacactgggaaggactgatgtgccagccacgttttcctcactgccttcttctgcccaccaccccattttgttcttttgttctcactccctcctttctgcctccctaaaatctttatttcctgagttgggatatcagattcaaaattctaaattcaccatggagtgtcgctgagggcagaatcagacaacaggtcaggagatggagaccatccttgtccaacatggtgaaaccccgtctctaataaaaatacaaaaattagctgggcatggtggcgcgcacctgtagtcccagttattcgagagattgaggcaggagaatcacttgaactcgggaggcggaggttgcagtgagctgagattgcaccactgcagtccagcctggcgacagagcgagactctgtctcaaaataataataataataataataataataataataataataataataaaaaattagccaagcctggtggcacatgcctgcagtcccacctacttgggaagctgatgtgggaggatcgcttgagcctgggaggcggaggctgcagtgagcccagatggcaccactgaactccagcctgggcaacagagtgacactctgcctcaaaaaacaaacaaaacaaaacccccaaaaagaaaactcaacgttgaatctctagagtagacacctcattctcatggccctaaatcaggaatgagtaacctaggtaaaggaaatctacacacagcatttcattaagtactcttattttattagtaagtactcacttattttgcttagtgtggtcctataatttcaagttccatactccagacaaccaaacgcatgcaaaaacaactgaaagtagaaaacttgcatgaatttaaatttcagttccatttaacagttcagcatagctggccacctgttatgtactgggcactagatacaaagatggttagagttagacacacagtctctgccctggacaagcttccacctttcttttttcttcctatttgtacttactcacttgaggatctatagtctggctgactttagttgcagttttttgcaagagtaaaaaaaaaactgctcctcggggaccatttgtcatacaagggtttcacccaggtctcaagactctatgcccagcccttcatgttccagtttcagtacttggtgttccggagggtactgttgcccgagtctgcatcttctgtctaaacttttagggccaagggacaggctgagctacacagcccctccatcgtttaaggagcatgcgacaaatgaaaacagaggtgaagtagccagtaaacccagtgaactgtgagttcttctcatttatcccatgttgttattcctgccactttaattagaaagacatcatttagggaacaaatgaatgttggtgatttgagtcttttcagcatgatcagggaagatgaaagtcgaccctaggtcaaattccaacttcattgcttaaaagtggaaaacaagcgtctctctgttctctgaggaaatgaaaataaaggtccatttctcagttgaaggtattccctctatttacatttatatttttttccttaggtcataattcctttgttgtgttttttttttttttttttttttgagatggagtcttgctctgttgcccaggctggagtgcagcagcgtgatcttggttcactgcaacccctgcctcccaggttca

SEQ ID NO: 13829 - DNA, 571 bp, Homo sapiens
cagcccccgccgcgcccagcctcgcgtccaagtgggacacagacagctccacacagccggtgcaccggtgccggagaaacccaagagggggccaagggacaggctgagctacacagcccctccatcgtttaaggagcatgcgacaaatgaaaacagaggtgaagtagccagtaaacccagtgaactgtgagttcttctcatttatcccatgttgttattcctgccactttaattagaaagacatcatttagggaacaaatgaatgttggtgatttgagtcttttcagcatgatcagggaagatgaaagtcgaccctaggtcaaattccaacttcattgcttaaaagtggaaaacaagcgtctctctgttctctgaggaaatgaaaataaaggtccatttctcagttgaaggtattccctctatttacatttatatttttttccttaggtcataattcctttgttgtgttttttttttttttttttttttgagatggagtcttgctctgttgcccaggctggagtgcagcagcgtgatcttggttcactgcaacccctgcctcccaggttca

SEQ ID NO: 13830 - DNA, 29943 bp, Homo sapiens
gggacatgcttattctgcagcgcaaaatcaacgtgtgttatcaggtgcaaggaaagatggtacaggaaggggatggataacaggaacgtgggaaccactcacaggactgggaatgaagcaagacctaagtttccagggctgataccaggtgatgtgctatcctgagcaaacacacaatggctgtcctttgaagaacttgaggactcacacatgcccacggcaccttggcactaggagccagtgatggggccagcccatgccaatggcaagcgtaaggcttctgggttcaaattttgccagtcctaggaaccaccctacctcaatgatagcacaactagtcttggaggggtctgcaaggaaatcaaaccttcttctagtgggtgaacctgcccagctaaggatagcagtcttcttgacctagccagtgccacattttttatgctctttggttttaggccactgagatagaaaagttcagacattattttgtttcaggaggaactggaggcaatgatgacaaaagctgacaatgataatagagatcacaaagaaaagctggagaggttgactcgactactagacctcaagaataaccgtatcaagcagctggaaggtattttaagaagccatgaccttccaacatctggcaagtcttagtcctttgttctcctcacttcgggacccttccacagctaacgcctgtgttccactctgtgtacttgtcaagaagggtgcctctcatacccttagcatatgacttatccttcttgttctttatcctatcatttttgttgtttttttttgcttgtttgcttttgagatggagtcttgctctgtcactcaggctggagtgcagtggtgcgatcttggctcactgcaacctctgccttccaggttcaagcgattctcctgcctcagcctcccaagtagctgggatgacagttgtccaccaccatgcctggctaattttttgtatttttagtagagatggggtttcaccatgttggccaggttggtctggaacttctgacctcaggtgatccacctgcctcagcctcccaaagtgatgggattacaggtgcgagccactgcgcccggcccatctttgttgttttaatacatgttagcagcttctttccctccatcatgtttttctgatttctctgtagagtttcaagtgggcccagcaattgcttccaggggcttaattctgttgtgagaatgagtatcactgttggctctcagggtggtggtgtaacacacaatctctctctctctctctcattctttctctcttgctcctctcccctgtccctctctcctagtcactgtttcctcaaagcagttttagtcggataatagaacttcatcactcatctcctgttattcttgtcagtgatttctctcttaaaagctctaaaatctttgttgcaatttgaggatgctgacagtgacagggcagctggctggacactgaatgcaagtttcatattgtggtgcctcctatacttagtgtagtcactgctgaccagagcctggtctcaggcttgtttgtcaagacacttggctttgttattatacccagtggtgaaagatctgactcacgaaaaccaaattaaccagaagctgatatttaaacccaaatgtttgttattttacaatagtggctattccactgcttccatgaggaacttggaaccacagttcagggcagccctctttcgggaagcaaaatcagtaagtaggtttcttagtgagcatggaatagaataaagggacatggctgggcacggtggctcacacctgtaatcccagcactttgggaggacgaggcgggcggattgcctgaggtcaggagttcgagaccagcctgaccaacatggtgaaaccccatcgctactaaaaatagaacaattagctgggcatggtggcgggcacctgtaaccccagatacttaggaggctgagacaggagaatcgcttgaacccgggaggcaaagttgcagtgagccgagaccaggccattgcattccagcctaggcaacaagagcgaaactctgtctcaaaaagaaaaaaaaaaaagaataaaagcacataagtgtctctgggccgtgatttatccatgtcagcgtgagtctgataaaagatcactgcttctacctacgtctgaagatttatttgctttagctaatagttctttgatcactggtaagactaaagagtttttctatgttcaccagttatttgtattattccttttgagaattgaccgttcctatcctttgcctacttcttaacagtatcctattgatttatagaaattctttttatgctgagattattactcctgcatcatgtaatgcaaaattttaagtatattatatttaattatattaatcttgttaattaagaaagtagtctccttattcgtgtgtgtgtgtgtgtgtcatgaagacattccgatgtgtccagaatattttattctactgctttaactcttaaaataggaccttcggcagcagcacactgtgttgactcaaatattccccaatttgaagcaggctatatatcaaagtttctgattggttggacttgggagataatacccagatttgctagactgtctacctatctttgcgtcccactgccaatatttcctacctctttccagtaagtctcttttcccactttttactccattactctttaacttataatgtactttttgccttcttatgttgaaaccaaattctgaacagaatgaaagatctcctgactgacctggctagagaaggagaagcatttcttggtgggactcaatgtaatgtcatagacactatgtctgcaacttgctattatctccacggccaatataccaaacttgtagaaatattcatgtttttgtgtttctagtacttctcttatggaattaccagttaatcatagggccacgatgtacaccaaaacaatgtcatatataagataaaatgtgcccccagtgttttcctaagtttagcatctactttccagtcactccttttgtaccttctccctaaagctggcattggattatttggctatcggaattcaatgctcctggttgtccttctgttgcttttccttttgaatcacgtggtttcttgaaataatcacaacttggacttccaccatgtgttttatatttcttttgtccaccctcctctaccctaagaaagagctccctaccctttaacggataggcagctttctttcccctctagaacagctcaaagatgttgcttatggcacccgaccgttgtcgttatgtttggaaacactgccagcccatggagatgaggataaagtggatatttctctgctgcatcagggtgagaatctttttgaactgcacatccaccaggccttcctgacatctgccgccctagctcaggctggagatacccaacctaccactttctgcacctattccttctatgactttgaaacccactgtaccccattatctgtggggccacagcccctctatgacttcacctcccagtatgtgatggagacagattcgcttttcttacactaccttcaagaggcttcagcccggcttgacatacaccaggccatggccagtgaacacagcactcttgctgcaggatggatttgctttgacagggtgctagagactgtggagaaagtccatggcttggccacactgattggtaagtgccgttggcttcctgcggctcctaagcaccaatgcagaatttcccaaagcctacagttgcttttctggtggtttcttattttcttcctttgtcttgttcttgatccttgccacaccatctgtattccccctgctttcacactttctgctacccaggagctggtggagaagagttcggggttctagagtactggatgaggctgcgtttccccataaaacccagcctacaggcgtgcaataaacgaaagaaagcccaggtctacctgtcaaccgatgtgcttggaggccggaaggcccaggaagaggaggtgagaaaaaagatgtgccgaggcatctcagaggagcctcagccaaacagctcatgagcacagttcagtcttccactctcaataagtgtttgttgaatgtgaatgaaagagaaaactgtcacaccacaactagtctggattattcccttggtcaggcttgagtctgaaatgaaagtatgcctttggagcgagctacatccttcatccttgctgtgaacagaatagcttctctgtgccattctctaagttaagtcgtgagtgccagtatctccctgaaataactgccagagccagtttgcaggcaggtgaagatcattaggtttcttcctgatccagttgggatagctgttctctagatcatagctcttcctcaccacagatcctaggcttcacctacaacagtctcaagctgcccttttcctcaatccatgaccaacatctttccagttcagatcggagtcttgggaacctcagaacgagctgtggattgaaatcaccaagtgctgtggcctccggagtcgatggctgggaactcaacccagtccatatgctgtgtaccgcttcttcaccttttctgaccatgacactgccatcattccagccagtaacaacccctactttagagaccaggctcgattcccagtgcttgtgacctctgacctggaccattatctgagacgggaggccttgtctatacatgtttttgatgatgaagacttagagcctggctcgtatcttggccgagcccgagtgcctttactgcctcttgcaaaaaatgaatctatcaaaggtgggagttcgaggttattacatcttcacgccctcttcccagtgttgtctccctgtcctgattctacttttctttgattacttgcttgaaacagtctctcttaaaacctgaagataaaggatttagaatattgtcaagagcaacagagcagaagacttagagcctcactacttgtgtggaaacactggcttcttctgcttcttttcagccacaaagacaacattcctaagtgggtagagccagcaacctgaattctatacctctgtatctgaataaacttctttgttttttgagatggagtttcgctcttgttgcccaggctagtagctgggattacagacatgcgccaccacacccggctaatttttgtatttttagtagagatgggatttctccatgttggtcaggctggtcttcaactcccgacctcaggtgaacctcccacctgagcctcccaaagtgctgggattacagacgtgagccaccgcgcctggctgaacaaactttttcaagctctgtaatgctgtctagtatctgtctttactaaaggcctgttgtttcttagtgcatgactacatagatatctgattataaactgagaccttaacactcccccatcattctctcacttcttttaaacactggacacaagttagagagatttccacaccagatcatgacaaacacaaatttcttggattttttttttcctcccaatgtggagctgagctccatactgtctttcctaacttttatacctaggattgtgggggtgtaccaagaggggtcaactctttgactacagtcctgggagggtgaggtgggggtatccatgttttccttaggaagtggggatagctgcagtcagaaacaaccatatttaacaagattctggatgctccaggacatgtatgcagctctctcctcaatacaactgcttaaaaaaaggctgacacttctggacacaactcctttgccaaacaggggaggcagtataagccacctgttaatcagtgttacaaatcagacatctggcatttcgaaagagccattttgcttaagttttcttgggaccacttgagggtagaggtaacagttttcttggtacaactaaggcacagtaagcatttgataatagtaataataatgcagccttgttcattggctggatgactgatgacaagcaagctgtactccttttcatacacccttcactatctcttcctgaatcctagagataacccatcttccctgattaatattctaactgcactgctgtttgattttacttctgagtgtatcatcatcgtaattatttaatggatgttaattaattgctgataaaatatgttgaaattaaaaatgggaaggaagtagataaggtgctgacaaatgctcacttgcttatttcatgtgatcaggtcttattaatatctgtttgtttctcaggtgattttaacctcactgaccctgcagagaaacccaacggatctattcaagtgcaactggattggaagtttccctacataccccctgagagcttcctgaaaccagaagctcagactaaggggaaggataccaaggacagttcaaagatctcatctgaagaggaaaaggcttcatttccttcccaggtaactctccaggactccacaggtagcagatctctgccaatcctatggagcagatttgaaggagacagtattatagttgaagtaggtgcagtggctcacgcctgtaatcccagcactttgggaggccatggcaggcgaattacctgaggtcaggagttcaagaccagcctgaccaacatggggaaaccctgcctctactaaaaatacaaaaaattagctgggcgtggtggcacatgcctgtaatcccagctactgggaggctgaggcaggagaatcacttgaacctaggaggtggaggttgcggcgagccgagatcacgccattgcactctggcctgggcaacaagagcagaactctgtctcaaaaaaaaaaagaaaaagaaattccctctgtgagtgtcatgtgtcctgtgaacttaatatatatccctcataatgccatgagactactgatggagcgaaagcctgggttttactgcggaaaagagagagaaatagcatttctcagctccatgaggagagaaatgaagtctaacactagttcccaaatccctttcttgtgtttctaggttgttaaactaccagcttgtaatgctatctctgatctttctattcaggatcagatggcatctcctgaggttcccattgaagctggccagtatcgatctaagagaaaacctcctcatgggggagaaagaaaggagaaggagcaccaggttgtgagctactcaagaagaaaacatggcaaaagaataggtgttcaaggaaagaatagaatggagtatcttagccttaacatcttaaatggaaatacaccagaggtaagaccttaaaaactctgaagcactaaattgtgggttgtagtgtccccagatgtattattctcagaggtagaagcagaagcagaagcagacacacaagataagcactaatcggccgggcatggtggcttcggcctgtaatcccagcactttgggcagttgaggtgggcagatcacctcaggtcagcctggccaacacggtgaactcctatctctgctaaaaatacaaaatgaggcctggtgcagtggctcacgcctgtaatcccaacactttgggaggccgaggtgggtggatcacctgaggtcaggagttcgagaccagcttgaccaacatggtgaaaccctgtctctactaaaaatacaaaaattagccaggcatggtggtgtgtgcctgtaatcccagttactcgggaggctgaggaaggagaatcacctgaagctgggaggtggaggttgtggtgagctaagatcgcgccattgcactccagcctgagcaacaagtgagaaactccatctcaccaaaaaaaaaaaaaaaaaattagccaggcatggtggtatgtgcctgtaatcccagctactcagtcgggaggctgaggtaggagaatcgcttgaacccaggaggcggaggttgcagtgagctgagatcgtgccactgcattccagcctgggcgacagagcaagactccatctcaaaaaaataaaaataagataagccataatcatagctaattgtggctagcttgtgtttccacaaacacaagtagtttaacaaacccctggactgttcatttcaatgtaatttaattcagcatattatgtactctacagtttatgcttaaagttttaatactatatatatttttaaacaagtactcactttttttttttttttgagaccgagtcttgctctgtcgcccaggccagagtgcaatggcatgacctcggctcactgcaacctccgcctcccaggttcaagcaattctgctgcctcagcctcccaagtagctgggattacaggcacgtgccaccacacccagctaatttttgtatttttagtagagacgaggtttcaccatgttgatcaggctggtctcctgacctcaggtgatccgcctgcctcagcctcccaaagtgctgagattataggcgtgagccaccatgcccggccaacgagtactaacttttaaaaattaaaaagagccagtattgtctgggcatggtgactcacgcctataatcctagcactttgggaggctgaggcatgcggatcacatgaggtcaggagttcgagaccagcctggccaacatggtgaaaccccatctctactaaaaatagaaaaattagtcaggtgtggtgacgggctcctgtaatcccagctactcaggaggctgaggcaggagaattgcttgaacccaggaggcgaaggttgcagtgagccgagatggtgccactgcactctggcctgagtgacagagggagactctgtctcaaaaaaataataataataaaaattaaaaaaataaaaagagctaatatttaaaaagaaggcaggaaggaaggaatgaagaaagaaaaccaagatattaccagctatgtagtattgttgttcttattctgaagcaggtgaattacactgagtggaagttctcagagactaacagcttcataggtgatggctttaaaaatcagcacgaggaagaggaaatgacattatcccattcagcactgaaacagaaggaacctctacatcctgtaaatggtattgtcttttaaaatctattttttttcctagcactttgggaggccgaggtgggcagatcacgagatcaggctttcaagagcagcctggccaacatgatgaaacccgtctctactaaaaatacaaaaattagccgggtatggtggcaggcgcctgtaatcccagctacgtgggcggcggaggcaggagaattgcttgaacccaggaggaggaggttgcagtgagccgagattgcaccactgcactcctccagcctgggcgacagagcgagactccatctcaaaaaaaagaaaaaaatatatattttttctgtttaatcatttaattgttttgccaagctagttatttacttttctccttcaccttagaatgctaaagttttcatggaaaattagtatgtaagacctgaggcccagttttgtgttacaagtgtgatggttgggttaaccaaggctggaattcttaaataagtaactttctcagtgtttataaaatgttattttgccccaggatttttttgttttgttttgttttgtttttgagatggagtctcattctgtctcccaggctggagtgcaatggcaggatctcagctcactgcaagctctgcctcctgggttcaagcaattctcctgcctcagcctcccgagtagctgggattacaggtatgtgccaccatccccggctaattttgtatttttagtagagacaggttttctccatgttggtcaggctggtctcaaacttctgaccttaggtgatccgcccacctcagcctcccaaagtgctgggattacaggcgtgagccactgcacccgacctagttttgattttctcattaaaactgtttgttggctggttgtggtggctcatacctgtaatcccagcactttgggaggcatgggcgggtagatcacctgaggtcgggagtttgagaccagcctgaccaacatgatgaaaccccatctactaaaaatacaaaaaattagctgggcatggtggcatctgcctgtagtcccagctactggggaggctgaggcaggagaattgcttaaacccaggaggcagaggttgcagtgagctgagattataccactgcactccagcctgggcaacagagcaagactccgtctcagtacaaaaaacaaaaaacaggacagtgtttgtcttgattattgagtttttggcaccccttcaaattttatgcctaaggtcagtgcctcacatgccttcctctacttctgacagtggtcagaatagtggttactgctaggagaaggggaagagggttatcaggaaaggacaccctttgggcatctggagtgctaccagtgttctatttcttggctgaacggtgatagagatgttcattttacaacaatttaataagttgaacatttatatttcatgggcttttctatgtgcttgaaaaatttaataatgagaggaaaaatataaaggtagatatggaaatattatgaaaagagagtctttactacttaaaaaagctttttttctaaatctctagaagcattttatatatatataattttttttttttttttttttgagatgaagtctctctctgtcacccaggctggagtgcagtggcacaatctcggctcactgcaatctctgcctcccaggttcaagcgattctcctgcctcagcctccagagtagctgggactacaggtgtgccccactatgcccggctaatatttgtatttttagtagagactggatttcatcatgttgtccaggctggtctcgaactcttgacctcaagtgatccacctgcctcagcctcccaaagtgctgggattacaggtgtgagccaccacgcttggcctaaaagtataatttttaagcttttgaatgtatttggcataacttcttaaatgggaagagcataaatgatttttctcatgagaaggataatttttctattgattatgtaatctgatttctccgtcaaagtttactcaatgtaaggaaggttaacaagaataaccaagcccaaaatttcccagagccaaatttacatgactggcaagaaatcctggttataagagaacaattccattcttatgatttgcagacaatggaatattatttagtcataaaatagtagaataaatagtaacagtgtatctagatagcttcagtgtatccagacctgaatgcggggttccagttatctccatactcccaatttacatttcttcaggtatttgattgagtataatctatatccactagctttttctccttgtagaatgtgaaatatgggaccagaaggtaatctaaacctcatgtactatatggtcatctatttatagtcataaataataaaagaagactatttctgtggaagcctaattgttagttattgttttaatatcgctgttctccatgaatttcaaaagatcaagactggccaggcgcagtggcttacacctgtactcccagcagtttgggaggcagaggcaggcagatcacctgtcaggagcttgagactagcctggccaacatggtaaaaccccgcctctactaaaaatgcaaaaattagccaggtgtggtggtgggtgctggtaaccccatctgagaagctgaggcaggagaatcgcttgaacctgggaggcagaagttgcagtgagctgagaccatgccattgcactccagcctgggcaacaagagcaatgcttcatttcaaaacaaaaacaaaacaaaaacctcaaaagcaccagttagtactcgcaagaagctaaaatctgcctggtttcagatgtctgagtggagctatcaagcaggatgctgtagttgttgaaaaagaagcttattaatcttttagacaaagatctaagggtattaggtaaaggccatcaagaaatgaaaagggcctgattttaaggccatttccacatatgtagacaaagccttgtgtcttttagcagcctttgcttttgctgcccgctcagaccttttccctttgagacctcagtgaaacagacaacccaagactttgaaattttacagaagaggcacagcttgccatccagttatctaatgctatgtaacaatctactccaaaacttaatgacttaaaacaattgtcatttctttggctcactactcggcatgttaggcaggtctcatgaagaaggctcatttctcctctctcaatgtggcattagatggggtagctcagctagggggctgatgggttcatcttgcaagatagctcaccctactagctgatcaggtggtcctggctgtcagtggttgcttgggcttcctcacaggttggtagctgagttccaagacagcaaggtacaagtccatggcatttttgtgttctggccttagaagtcacatagcatcactcctaccgtactctttcagttgagacagtccaaaagatccaccttaattgaaggggaggggacaaagaccccaccactcaataggagcagcgtcaaggtcagtcgcattgtaaggagagcagctgagataggagagaccatttgaggccacctttttttttttttttttttgagacagagtctcttgtcgcccaggctggagtgcagtggctcgatcttggctcactgaaacctctgcctcccggattcaagcaactctcctgcctcagcctcccgagtggctgggaccacaggagtgtgccaccaagccaggctaattttgcatttttagtagagacggggcttcaccatgttggccaggctggtctaaaactcctgacctcaggtgatccacctgcctcgaactccaaaagtgctgggattacaggtgtgagccaccacgcccagccagagaggccatctttggaaaatacaatctgccccacccaattgcacagctttacctcaagcttggccattttcttcagcccccacaaaaggacttcctttcttccttccttactctcacccttccttcctgtcttccttcctttcttcctttctgtttttccttctttccctttctttttttgagaagtgaatcctgtatgtttggcaagcttctgaataagtgtacctttgaaaaagagggtttgattcttagtaagtgaaggcaaaatctagacactcggaactagtgaccagacagtggattggagatgtgtgtgctgggtcttttcttgggctaaagtgctttgaaacagttctataactgcaacctcttctctagcagacaaagaatcctctgaacaaggttctgaagtcagtgaagcacaaactaccgacagtgatgatgtcatagtgccacccatgtctcagaaatatcctaaggcagtaagtacactggagtaatcattgcatacgagataagacgataaataatgacagtggccagtcatgggggctcacgcctgtaatcccagcaccttgggaggccgaggcaggcagatcacctaaggtcgggagttcgagaccagcctgaccaacatggagaaaccccatctctactaaaaatacaaaaaaaattagccaggcatggtggagcgtccttgtaatcccagctactcaggaggctgaggcaggagaattgcttgaacccgggaggcagaggttgcagtgagccaagatcacgccattgcactccggcctgggcaacaagagcaaaactctgtctcaaaaaaaaaaaaaaaaaaaaaaaaagcaataatgacagtgtgcttagtggccacacaagtgaagggcaatccagttttaatgaagctgatggaaaatgcaaattgtttagttaaatttatgtttcgtgtgaatgaaggtcggctggtacagtcagataaaaggatcattttcttgagatagtgtaaatgatgacttgcttcaatacttctgtcctatctggatcctttgcctcttactcccatatcctccattgtgtcctgtaattcatgcccagcctgaatggtacccctgcctttaagtccatctaaggaaaacgggtttgctttgggagatggagtctggaagagaggacaggattcttcatgggagggctcatggagatcattccatttctgctgttttttactcaacctgtaattatctattaaacagttcagcctcaaagctctttcagaactgatttaagagacacgcatcaaaaaaatataaaaaagaaaaaaaagccggttgcggtggctcacgcctgtaatcccagcgctttgggaggccgagacgggtggatcacgaggtcaggagatcgagaccatcctggctaacacggtgaaaccccgtctctactaaaaatacaaaaaaattagccgggcgtggtggctggcacctgtagtcccagctactcgggaggctgaggcaggagaatggcgtgaacccaggaggcagagcttgcactccagcctgggcgacagagcgagactacgtctcaaaaaaaagagacacacatatattaataaatatccacacatatattcagtaatcattgtgttctaaccttgtgggttacacatgaggtagaaaacaattactcttaagtcgctgctgcctgacacatttgtaggtcctcaatatttgttgagtgagtgactgaataatagattcagagtgaattgatgattatgaacttcattagaaacattaaataagaatgtaggatgacctaaaaccaaggaggtagattgtgtaatataaagtctgttgtaagaaatcagaaaagggaatttatggtttcttttgtagaggttggaaaactcttccttgaaagctggaacatgtgcttgagaactgcaggaaaatgaaggatattggagtgaggagaaaaaactcaaagtcagtagacttaaacactgaatataacacatagttcaatttcagctgaggtgtggtggctcacacttgtaatcccagcactttgggaaactgaggcaggcagattgcttgaggccaggaatcaagaccagcctgagcaacacagcaagacaactgtctctacataaaatttaaaaactagctaggcgtgttggctcacatctgaagtcctaagtatttgggaggctgaggtgagaggattgcttgagcctgagagtttgaggctgcagtgagccatgatcttgccactgcactctagcttaggtgacagagagagaccctgtctcaaaaacaacagcaacgacaaaaccagttaagtttctctttgtctgaacttttatctatcatatctttttttagatattatgtagttatctgacaagtgtttgtaagacagactggagccacagaatgttggaattagataacacttctatattaccaaggtaaagaagattaaatgatgtgtacaggattattgagttagtgaaagagctgaaactccagttgaggtttttaaactgcgcaacctctcaagtaaccaaaaaaagcagccagctgatcagcaaactcatcttgaactgtaacaagccagccagatttcattaaaaacattacctaaattaaaggctcctaagtaagatatccttttagaaaacttccttgtgtgccccaaagtgttacttgagaaattaaatatgagaaaggagcctatctaagcaaaaaattagtgttattatcaagttaaacgtacaacacaggcacatatatattaaattattgttatattccaaaatgtccaggcatgaaaggtagagggggttgaaagctcagagtcaaaacttgagttctgtcactcttctgcctggggtcagctgggataaatggaaatgcagtagagtgtaatgtttaagagcatggagatttggttgagacagtgatttagatcccagctctgctacttaactagatatacagctttgagagagttttttaacctctattaggccttgtctccttatctgtaaaatggtagtattaagtatacccatctgatactgatgtggcaagattaaaataagggtttaatacagtgcccgagacaaattaagccctaaatgatagtgaggatgagtgtgatgataatagtagtctcatttctctgacctactggagttctcaatgttaagctttttttttttttttttgagatagagtcttgttctgttgcccaggctggagtgcgtgcagtggcgcaatctcggcttactgcaacctctgcctcccaggttcaagagattctcctgccacaggctcccgagtagctgggaccacaggtgtgtgtcaccacgaccagctaatttttgtatttttagtagagacggagtttcactatgttggccaggctggtctcaaactcctgacctcaggtgatccacccacctcggcctcccaaagtgctggaatttacaggtatgagccactgcgcccggcctaggttaagcatttttttttttttttttttttttttagagtctcgctctgtcacccaggctggagtgcagtggcaccatcttggctaactgcaacctccgcctcccgggttcaagcgactctcctgcctcagcttcccaagtagctgggactacagacacacgctgtcacgtccagctaatttttttgttttgagacctagtcttgctctgtcacccaggctagagtgcagtggtgcgatatcggctcactgcaacctccgccccccaggttcaagcaattctcctgtctcaccctcccgagtagctgggactacaggcgcacgccaccatgcctggctaattttttgtatttttagtagagatggggtttcaccgtgttagccaggatggtctcaatctcctgacctcgtgatctgcccgcctcggcctcccaaagtgccgggattacaggcgtgagccaccgctcctggcctccctcttcttaacagttactaatgaggagggagcaatcattttcatttgctctatggtcccagattactgtttctttagcaatagtgaatatcgagaacctcaaaattttttctcttatcgtgtcaatttcaggtgtcaggaatttcctgacccttatgtatgccaggtagtaagttttggcagccctgccccccagccaaattaggtggcacatctgagctaataagccaaagggtgttatctggcactaatccttgcagggtttctgccagcaagttcaaatgagttgatatatatttcaatggttaatattactaattgcatactttctttgctgttcagccccaataaaattacataatggaattagctcatgtaaagaaagtattctgaatccaacaaaaaatattagattgaaccatatattgtcatactcatagataaaaaatggttgacaattgtcagttctgtatagtccaacctaatatgaatgaataaaacatctgtgtgtacttggatcaaattttaatcttattcatcctcccatttcaccattgttaccagaataaacttgatgtagtctgcatgaatatggacttctgattattgtcccaggattattagcaagtttaaaaaatttgctgggtgtggtggctcacgcctgtaatcccagcactttgggaggtcgaggcgggcggatcacctgaggtcaggagttcgagacaagcctggccaacatggtgaaaccctgtctacaaaaatacaaaaattagccgggcgtgatgacgggtgcctgtaatcccagctactcaggaggttgaggcaggagaatcgcttgagcccaggaggtggaggttgcagtgagccaagattgcaccactgcactccagcctgggcgacagagcaagactctatctcaaaaaattgttttgttttgtttttttaactaggcaggtgtggtggctcacgcctgtaattctagcactttgggaggccgaggtgggctgatcatgaggtcaggagatcgagtccatcctggccaacatggtgaaaccccgtctctactaaaaatacaaaaattagctgggcgtggtggcgcgtgcttgtaatcctggctactcgaaaggcggagaaaggagaatggtttgaaccaaggagtcggaggttgcagtgagccgagatggttcccctgcactccagcctggtgacagagcgaaactcggtctcaaaaagaaaaaaaagaaaaataattttagatgtacaggaaggtgctatgtaatgtttatttagttttactcttttttcttcttttttggtaatgttatgaaacatgtatttttcaatcaataatgttttggggttctatccatgtcgatatatttagctttttatagttccttcgtcttaactgctgatcgatattgcattaaaataatacatgacctttcgtttagacagaactctaatgggtaatgattgagatttcatactgtgtgccaagtgcttgatattcatgactctctcgggcttcacagcagccttatgagttattctttccttcaagtaattatgaagtgcctgttttagtaactgccgggctctgtgggcacaaaatggtggataagacagacttggtctcttctctcttgaatcttacatactactgagggaaaatatgtacatcagtgagcaaataagtaaagcagatagctctgagattctaagtactatgaaggaaataaatagggcgatataatagcaatgcgaggagttgaactaggataggtgttgaggaaagatttctctgaggaggggacgtttgaactgaaatctgaagaacgagaagggaagagctacccatgtactgggtagactgtactcatctcaggcaaaggaattggtaagtgtaaaggccctgaggtaggaaagagtttgatttacctgaggagtgggaaatcaaaagaaaattaaagtttctcttgcacacatgtatattattattcccccaccccctttcaaaggaggacagtgaagtctagggagaagagcttgctcaagggaatatttaatacagttttactgagtgtatactgtgtgccagacattatgccaggcattgtgccaggcactagatactcggtagagactttaatggggccgggcgcaatggctcacgcctgtagtcccaacactttgggaggccgaggtgggtggatcacttgaggccaggagttcgagaccagcctgggcaacatggtgaaaccccgtctctactgaaaatataaaaattagtcgggcatggtggcacatgcctgtagtcccagctactcaggaggctggggcaggagaatcgcttgaacctgggagtcagaggttgcagtgagccgacgtcgcaccgttgcactccagcctgggcaacagtgctagactccatctctaaataaataaatacagattcccaggagccactctagacagtctgatataacacagaggcttttatacattttttatagcaatcactatgagaaatacatttctgcagtatccaatactcttataaaagaacaagtttcaagaaaccaggcttactattaacatttgccatgcattctcctattccactagatagtgtcttatcctgtctatcctatcctattgtttcttttttaaaaagctagtgaaacccgctaatctgacccatcaaagtgtcaaaaaaaaaccagatttttcaaaacactgtatagtcaatagttttcttgatgtttgggagagttggatgttatgggagggttattaagagaaaaacatcaaatatcgtttttttgtttgtttgtttgttttttgagacccagtctcactctgttgcccaggctggagtgcagtggcactgcaacctccacctcctaggttcaagtgattctcatgtcagcctcccgagtagctgggattacaggcatgagccaccatgcctggctaatttttgtatttttaatagagatgcggtttcaccatgttggccaggctggttttgaactcctgacctcaggtcaactgcccgcctcggcctcccaaaatgctggtattacaggtgtgagcctctgcaccccgccaaatatcttcatttttaagaagcaccccagatgattctgatgcagaatcattgagagatcttgcctgctgaatttcttaggggcaggcacaggagctccacttgctttctaagagaagaaaagatggggtaagagccggtctttggagaagtaagggcattggcctggccagctagtgaaaagaagcatacaggagggcactcacagatagaggggagagcgctatggctggtagggaaccatcctggattgactcattactggtgtcacgatactgacttgcctgccacactgtggaaggaggagacttctgttggccttggtgtacttctggaaacttcctcctggtatccctgatgccaacatggacacagggacaattaaaagaaaggacagggtgatggcagcgactgtgaagtgggattgaaaatattggagttcctggccaggcgcggcggctcacgactgtaatcccagcactttgggaggccgaggcgggtggatcacgaggtcaggagatcgagaccatcctggctaactaaaccccgtctctactaaaaatacaaaaaattagccgggtgtggtggcgggtgcctgtagtcccagctactcgggaggctgaggcaggagaatggcgggaacccgggaagaagagcttgctgtgagccgagatcgtgccactgcactccagcctgggcgacagagggagacactgtctcaaaaaaaaaaaaaaagactggagttcctgtgggagggcagggtggtctggtggcctcctcagtggcatgcacttgagtgggcatgggaagccctgggcagctctttgctatagtggctgaagcagctactgaatctccagtatcagtcaggaggtcttttaggtcctaacctcaggaaaatactagcttggttttcatgaagaacactgtggccagttgcagtggttcatgcctctcatctcagccactttgggaggctgaggtggacagattgcttgagtccaggagttctagaccatcgtgggcaacatagcaagaccatatctctattaaaaaaataaaaataattgtccctatgtggtggtgtacctgtggtcctagctacttgggtgactaaggtgggaagactgcttgagatcaggatgtcaaagctgcagtgaaccatgatcacacaactgccctccagcctgggcaacaaagcaagactctgtctcaaaaaaaaaaaaaaaagttgagaaatagctgtttagaaatttatttatttgtatataatcatcgggtacaagcacagttttgctgcatttatatattccactgtggtgaagcctggagcgacgcacattgttcccaccaagcaacctcccatcatccaccctccccgccgctccgaatcagacatttttttttattctttctatatgtggagatgactgagaaaggctgtcctggagaaatgatccactggactgtgagagagaagagctgggttctctttataaatttcctatcaattaactatggcaattaagtcaagttgtcttttgatgccagttttacctataaaaggattctcagggaataatatagtagatagattatacctatggttgatttctagagagtaccgtaatgggttaattggatggcgtataagcacttggagcctcactaacctttaggaactaaataaacattttccttatcaggattcagagaagatgtgcattgaaattgtctccctggccttctacccagaggcagaagtgatgtctgatgagaacataaaacaggtgtatgtggagtacaaattctacgacctacccttgtcggagacagagactccagtgtccctaaggaagcctagggcaggagaagaaatccactttcactttagcaagggtgaggcatcctgtgtggttactggggtgaggaagtctgatgaacattgagactgagggtcagaattactctggatttttgtggggtgaatccagccatttcactttattattttattgttcaaagtgttgtgtgcatgtggtttaaaaacatcgaatggggctaaacattttacatgaagcaggcctttgtcccagctcttcacagatcacttcgcctgttcccacccttcctcaatccacggcttcccacatttcagctatatttatttttactttttgaggtggagtctcgctctgttgcccaggctagaatgcagtggtgtgatcttggctcactgccacctctgactccgagattcaagcgattcacgtgactcagcctcccaagtagctgggattgcaggtgtgcgccaccgtgcctggctagttttttgtgtttttagtagaggcggggtttcaccattttggccaggctggtctcaaactcctgacctcaagtgatctgcctgccttggcctcccaaagtgctgggattataggcgtgagccaccaagcccatcctatctcagccatttcttctgttatttacttccatcatatttctgagtattgatttttgttcttcctcttttcctgtttttttttttttttttttttttttttttttttttttttttgagatggagtctgaacatgttgctcaggctggtttcaaactcctggactcaaatgattctcctgcctcagcctcctgagtagctggaattacaggcgtgagccaccatacctggcttctgagtaacatttctattgcaatctcctgattcaccggctttagacttcctatctcggaccttaaaagttagctcttttgcactacactcatgtccctttccttcccatcgtaattgtatcataatttttatttaaatccatttaaattggttctgttattatggatatgtaaatattaattcttgcagaaccaagtagtatgcaatgattatatttctttacacgtattttttgcagcaatttttcattcgccttattttcattatacatattgtaattattttcgtgtccttcaacagtcttcccaaattttgaaataatcaaacctgtcaaattatctactcatctatttttttcctgaagacctctctccatcctcttgttctgctctagcccactgtttcattattactgctgctcatggagaatacgatcaaattctctcctataccagatttcttatctcctggttatcctctaatttattttcttattttaatggatcatattttcagtagtttttaaagaaagggcatatcacaagtgaaaatttgagaaagtcgtgcatgaaatctttttttcctaccctcatatttgattcaagtgtggaaatctttttcattcagaatttcgaaggagcctgggtgcagtggctcatgcctgtaatcccagcactttgggaagccaaggcgggcagattacttgaggtcagaagttggagaccagcctggccaacgtggcaaaaccctgtctctactaaaaatacaaaaattagccgggcatggtggggtgcacctgtaatcccaactactcgggaggctgaggcaggagaatcgcttgaacttgggagatggagactgcggtgaaccaagatcacgccactgcactctagcctgacacagtaagaatctgtcacacacacacacacacaaatgattttcaaagcagttggtccatgttattctagatccaggcaaggagtctaatctttttatgaaaactaccatgaataccactaatgaaagtcttggggctcacactgcaacagtatatgattctttgcttttttctcttacccttaatacagtaatagacctggacccacaggagcagcaaggccgaaggcggtttctgttcgacatgctgaatggacaagatcctgatcaaggacagtaagcatctgctttccactttgaaacaaaggagatattgagacagaaattcaaaagtttgagtttggttttgtgctgatgctgaatattttaataacttttttgagttaatttactcttaatgaatttcctatgtacttgagtataatttatatttgtgactacctaatccattacctaatcttataggttatttatttatttatttatttatttattttcgagacagggtctcactctgtcgtccaggctagagtgcagtggtgcgatcttggctcactgcaacctccacctccccaggctcaagggattcttgtgcctctgcctcccaagtagctagggttataggcatgtgccaccatgcctggctaattttttgtgtttgtagtagagatagggttttgccgtgttgctcatgtctggtcttgaactcctgcgctcaagcgatctgccctcctcggcctcccagagtgctgggattacaggcgtgagccaccgtgtccagcccatagtcttataggtttagttcatttctcacccatgccagcctgatgggccctttttttgtagcagcagtttacttgaatattgacaatgcccaaatggaataacaaaaagtgttgacattcttcttttttttgagacagtgtctcactctgttgtccaggctggagtgcagtggtacaatcttggctcactgcaacctccacctcctgggttcaagcgattcttctgcctgagcctcccaagtagctgggatgacaggtgcacgccacttgcctggctaatttttgtatttttagtagagacagggttttgccatgttggccaggctgatcccaaccccaggtgatccttctgcctcagactcccaaagtgttgggattacaggcgtgagtgaccacacctggtcaacaggaattttttgatgttgacataactaagtgaattttagatctcctttaaagttttaggaaagctggttgtccttattattccaataatctgaagaaggcctcctttcagagtttccagataaaatgtgggacatacccaaaaaaaaattatttggtcgggtgcagtggctcacatctgtaatcccagcactttgggaggctgaggcgggcagatcacttgaggccaggagtttgagaccagcctggccgacatggtgaaaccccatctctactaaaaacacaaaaaaatcagctaggcatggtggcacatgctggtaattctagctactcaggaggctgaggcatgagaatcatttgaatttgggaggcggaggttgcagtgagctaagattgtgccactgcactccaacctgggtgacaaagcagactctgcctctaaggaaaaaaaaaagttatttgttgtttagctgaaattcaaatttaaataggcatatggtttttgtttttgaaatctgttatccataccgcctgtgcatgtgtgtgcataagaaataatatggggctggtgttttatcttatttttaatttttttgtttgtttgttttagagacaggatctcactatgttgcccagctggtctttcagctcctgggctgaagcagtcctcctgccctgcctcccaaagtgctgggattataggcatgagccactgtgcccgacctggtgttttaattactttttgaaaggcccaatacttttgtttcatctgcttttactttgtctttggttagtcatagaaagaactgaaaaaggagccagatgaaataaacagtgactctgacttcagcatcactgtgggcttaaacagatgtaagcttacagagaacttttggacatggaaagtgatttggttctttcctttctgtgctaatgtcaaatttagctttcacttttttttccccagcatttccagaactctctcttcctttattcccttacagtgataatcattttctactcaattttagattcgattggtattacctttggctttctttttgccagtatggtctagcagacagagcaggctttgtaatcagaccaaccttgtttttattccagactctttgacttactagctctttgatctttttgatattacttaatttgaaggctcttgtgagaataaaattgagctaatatagtttacataaagcacttggtattgtgcccggcacattgtaatgctagttatcatccctttcctatgcaaattgggatgagggagtcagcattatcacttcgcattgttgaagttctcaataatgacatagaaacatagttacaaatgaatattgcctaatgggctgagaatggatccctttaaagtaattcctttgtttcagtttaatcatatttagctgtgcttttaaaagcttgaatttttagtcctattcctggcactctgtattagctaccaatatttgcttttaaaaattaataaaaatatgaaaaatcaagaataggcaaatccagagagatagaaagtagattagtggttcaggagctagggaaggagaatggggagtgactgcttaatcagtacagggtttctttttcttttttcttttagagactgggtctcgttctgtcacccaggttgaagtgcagtggcatgaacacagcccactgcatcctcgacctcctgggctcaagtgatctcacctcagccttccaagtagctgggactataggtgtgtgccaccatgcccggctaattttttattttttttgtagagacggggtgttcctatgttacccaggctggtcttgaactcatgggcacatcccatgatgttccctcttctaaaaggactgttactgcttaaattataccaattcctgacttttttgcttattgtcattttgtaaaatggaggcaagggaaaagtgattcagagaagacgttgtattgtttatgattacttttatccttattttatttttgaagcattaagagtatcaacagtgctgaattaaatgcaatttctttttagtttaaagtttacagtggtaagtgatcctctggatgaagaaaagaaagaatgtgaagaagtgggatatgcatatcttcaactgtggcagatcctggagtcaggaagagatattctagagcaagagctagacagtgagtcatttttttttcagttctaattatttccaaggaaatcatcctaatagtgaatatattttatcttcaatacataattattactatgaagttgataagacacaaagtggattgaaatcttatccctacaactgtatttatttctggatccaacattaaagtagtcagttgtgtatttttacccccatatacctgattacaactagaattgattttgaatctacaatgtttgaaaaggagatttttaaaaagacaagttattttcatttcaaatttatacatcagaattttggacctctcttgagcattttcgtataggcagctgatgcccattctttatgttatcatgcatccagtcttttttttttttttttttttgagatggagcctcactctgtcgcccaggctggagtgcagtggtgtgatctcagctcactgcaacctctgcctcccaggttccagctgttctcctgcctcagcttcctgcctcagcttccatggtgtgccaccatgcctggctaatttttgtatttttagtagagaccgtgttttaccatgttggccagactggtctcgaactcctgacctcaagtgatctgcttgccttggcctcccaaagtgctgggattgcaggtgtgagccactgcacctggcccatcttgtctcttaaaaagacattaactgtctcctctttcctcacattcactggtcattaagtcttatccattctacttgtgaattgactatgctctccttactacaattttttttttttttttttttgagacagagtctctctctgttgcccaggctggagtgcagtggtgtgatctcggctcactgcaacctccacctcccaggttaaagcgattctcctgcctcaacctcctgggtagctgggactacaggcacctgccaccacgccagctaatttttgtatttttagtagagacgggctttcaccatgttgcccaggctggtctcgaactcttggactcaagcaatccaccctcttttgcctcccaaagtgttggcattacaggcataaaccactgcgcccggcctccttaaatataattactataatttctttcttttttttttttttttttgagatggagtcttgctcttgttgcccaggctggagtgcaatggaccgatctcagctcaccacaacctctgcctctttcttaatcaagcgattttcctgcctcagcctccctagtagctgggattacaggcatgaaccaccacgcccagctaattttgtatatttagtagagatggggtttcttcatgttggtcaggctggtctcgaactcccaacctcatgtgattcgccctccactcagcctcccaaagtgctgggattacaggcgtgagccaccgcgcccagccatataatttctaaactggtcttcctgccaccggtttcttctaccccatttccatctactatagtaaatacataatacatttgatcactgccttcttcttaaatccttttacagtttgctatagatcagcatgttttaaaaacatttgtatttgagtacctttagttgggactgcgctgtccagtcttcactgttcccattaccttacatagctgggatgtcacctatcttatctgctaggaccttcagacacttaagattatccactagatcaatgtttttcaaacttccagacacacaccccattagtggatgtgaaactgaattagtaaatcacaaggaaatttgaaaaatgcaaaccaaaactgtgggaaagaaaacaggaattaaaggccaggcgaggtggctcatgcctgtaatcccagcactttgggatgccgagatgggcggatcacctgaggtcaggagttcgagaccagcctggccaatatggtgaaaccccatctctactaaaaatacaaaaaaaattagccaggcatggcggcggacacctgtaatcccagctactcggaaggatgaggcagaattgcttgaacccgggaggcggaggttgcagtgagctgagatcaagtcaccgcactccagcctgggtgacagaacaagactctgtctccaaaaaaaaaaaaaaaaaaaagaaaacaggaattaagagtacatagcacatattgtcttgtgaaacttgttttatgtattgtttaatgaatcatggtataaaattattcttactgatcattataaacattttttgaggaatactcctcagaccctaaggtttacaaagttcaaatgttagataagattctaattatattcctctagtatctttccaactgtgatccttagtctttttcctcatctataaaacgggaataacagcagtctctatcttactgagttgtgaagattaaggaagcacttaaataagggattaaggggcttagggtagtgcctggcataaggcaagtgacgttatctttgtgggctattttccaactcactcctatccccattcctaaacatgctatgttcttcctgacctccatgccatttgtatgtgcacagggaaaatccacttaagacttttctggtgatttctccagaaatcctttccaatttgtccattctggtgcagatgcctcgttatgtccccaaagcaacttgtgcttccatttattatatagcacctatacactataccattttcctttctccttcactagattgagtcctcttatgaaatgggtaatttcattcatttagcatccccagtacctaacctgacaaataccaagtatcaaagtgttcaactgagtgatgctgtttttttccctttcccaacagttgttagccctgaagatctggctaccccaataggaaggctgaaggtttcccttcaagcagctgctgtcctccatgctatttacaaggagatgactgaagatttgttttcatgaaggaacaagtgctattccaatctaaaagtctctgagggaaccatagtaaaaagtctcttataaagttagcttgctataacatgaa

SEQ ID NO: 13831 - DNA, 2373 bp, Homo sapiens
gggacatgcttattctgcagcgcaaaatcaacgtgtgttatcaggtgcaaggaaagatggtacaggaaggggatggataacaggaacgtgggaaccactcacaggactgggaatgaagcaagacctaagtttccagggctgataccaggaactggaggcaatgatgacaaaagctgacaatgataatagagatcacaaagaaaagctggagaggttgactcgactactagacctcaagaataaccgtatcaagcagctggaaggtattttaagaagccatgaccttccaacatctgggtgagaatctttttgaactgcacatccaccaggccttcctgacatctgccgccctagctcaggctggagatacccaacctaccactttctgcacctattccttctatgactttgaaacccactgtaccccattatctgtggggccacagcccctctatgacttcacctcccagtatgtgatggagacagattcgcttttcttacactaccttcaagaggcttcagcccggcttgacatacaccaggccatggccagtgaacacagcactcttgctgcaggatggatttgctttgacagggtgctagagactgtggagaaagtccatggcttggccacactgattggagctggtggagaagagttcggggttctagagtactggatgaggctgcgtttccccataaaacccagcctacaggcgtgcaataaacgaaagaaagcccaggtctacctgtcaaccgatgtgcttggaggccggaaggcccaggaagaggagttcagatcggagtcttgggaacctcagaacgagctgtggattgaaatcaccaagtgctgtggcctccggagtcgatggctgggaactcaacccagtccatatgctgtgtaccgcttcttcaccttttctgaccatgacactgccatcattccagccagtaacaacccctactttagagaccaggctcgattcccagtgcttgtgacctctgacctggaccattatctgagacgggaggccttgtctatacatgtttttgatgatgaagacttagagcctggctcgtatcttggccgagcccgagtgcctttactgcctcttgcaaaaaatgaatctatcaaaggtgattttaacctcactgaccctgcagagaaacccaacggatctattcaagtgcaactggattggaagtttccctacataccccctgagagcttcctgaaaccagaagctcagactaaggggaaggataccaaggacagttcaaagatctcatctgaagaggaaaaggcttcatttccttcccaggatcagatggcatctcctgaggttcccattgaagctggccagtatcgatctaagagaaaacctcctcatgggggagaaagaaaggagaaggagcaccaggttgtgagctactcaagaagaaaacatggcaaaagaataggtgttcaaggaaagaatagaatggagtatcttagccttaacatcttaaatggaaatacaccagagcaggtgaattacactgagtggaagttctcagagactaacagcttcataggtgatggctttaaaaatcagcacgaggaagaggaaatgacattatcccattcagcactgaaacagaaggaacctctacatcctgtaaatgacaaagaatcctctgaacaaggttctgaagtcagtgaagcacaaactaccgacagtgatgatgtcatagtgccacccatgtctcagaaatatcctaaggcagattcagagaagatgtgcattgaaattgtctccctggccttctacccagaggcagaagtgatgtctgatgagaacataaaacaggtgtatgtggagtacaaattctacgacctacccttgtcggagacagagactccagtgtccctaaggaagcctagggcaggagaagaaatccactttcactttagcaaggtaatagacctggacccacaggagcagcaaggccgaaggcggtttctgttcgacatgctgaatggacaagatcctgatcaaggacatttaaagtttacagtggtaagtgatcctctggatgaagaaaagaaagaatgtgaagaagtgggatatgcatatcttcaactgtggcagatcctggagtcaggaagagatattctagagcaagagctagacattgttagccctgaagatctggctaccccaataggaaggctgaaggtttcccttcaagcagctgctgtcctccatgctatttacaaggagatgactgaagatttgttttcatgaaggaacaagtgctattccaatctaaaagtctctgagggaaccatagtaaaaagtctcttataaagttagcttgctataacatgaa

SEQ ID NO: 13832 - DNA, 29385 bp, Homo sapiens
gagaggttgactcgactactagacctcaagaataaccgtatcaagcagctggaaggtattttaagaagccatgaccttccaacatctggcaagtcttagtcctttgttctcctcacttcgggacccttccacagctaacgcctgtgttccactctgtgtacttgtcaagaagggtgcctctcatacccttagcatatgacttatccttcttgttctttatcctatcatttttgttgtttttttttgcttgtttgcttttgagatggagtcttgctctgtcactcaggctggagtgcagtggtgcgatcttggctcactgcaacctctgccttccaggttcaagcgattctcctgcctcagcctcccaagtagctgggatgacagttgtccaccaccatgcctggctaattttttgtatttttagtagagatggggtttcaccatgttggccaggttggtctggaacttctgacctcaggtgatccacctgcctcagcctcccaaagtgatgggattacaggtgcgagccactgcgcccggcccatctttgttgttttaatacatgttagcagcttctttccctccatcatgtttttctgatttctctgtagagtttcaagtgggcccagcaattgcttccaggggcttaattctgttgtgagaatgagtatcactgttggctctcagggtggtggtgtaacacacaatctctctctctctctctcattctttctctcttgctcctctcccctgtccctctctcctagtcactgtttcctcaaagcagttttagtcggataatagaacttcatcactcatctcctgttattcttgtcagtgatttctctcttaaaagctctaaaatctttgttgcaatttgaggatgctgacagtgacagggcagctggctggacactgaatgcaagtttcatattgtggtgcctcctatacttagtgtagtcactgctgaccagagcctggtctcaggcttgtttgtcaagacacttggctttgttattatacccagtggtgaaagatctgactcacgaaaaccaaattaaccagaagctgatatttaaacccaaatgtttgttattttacaatagtggctattccactgcttccatgaggaacttggaaccacagttcagggcagccctctttcgggaagcaaaatcagtaagtaggtttcttagtgagcatggaatagaataaagggacatggctgggcacggtggctcacacctgtaatcccagcactttgggaggacgaggcgggcggattgcctgaggtcaggagttcgagaccagcctgaccaacatggtgaaaccccatcgctactaaaaatagaacaattagctgggcatggtggcgggcacctgtaaccccagatacttaggaggctgagacaggagaatcgcttgaacccgggaggcaaagttgcagtgagccgagaccaggccattgcattccagcctaggcaacaagagcgaaactctgtctcaaaaagaaaaaaaaaaaagaataaaagcacataagtgtctctgggccgtgatttatccatgtcagcgtgagtctgataaaagatcactgcttctacctacgtctgaagatttatttgctttagctaatagttctttgatcactggtaagactaaagagtttttctatgttcaccagttatttgtattattccttttgagaattgaccgttcctatcctttgcctacttcttaacagtatcctattgatttatagaaattctttttatgctgagattattactcctgcatcatgtaatgcaaaattttaagtatattatatttaattatattaatcttgttaattaagaaagtagtctccttattcgtgtgtgtgtgtgtgtgtcatgaagacattccgatgtgtccagaatattttattctactgctttaactcttaaaataggaccttcggcagcagcacactgtgttgactcaaatattccccaatttgaagcaggctatatatcaaagtttctgattggttggacttgggagataatacccagatttgctagactgtctacctatctttgcgtcccactgccaatatttcctacctctttccagtaagtctcttttcccactttttactccattactctttaacttataatgtactttttgccttcttatgttgaaaccaaattctgaacagaatgaaagatctcctgactgacctggctagagaaggagaagcatttcttggtgggactcaatgtaatgtcatagacactatgtctgcaacttgctattatctccacggccaatataccaaacttgtagaaatattcatgtttttgtgtttctagtacttctcttatggaattaccagttaatcatagggccacgatgtacaccaaaacaatgtcatatataagataaaatgtgcccccagtgttttcctaagtttagcatctactttccagtcactccttttgtaccttctccctaaagctggcattggattatttggctatcggaattcaatgctcctggttgtccttctgttgcttttccttttgaatcacgtggtttcttgaaataatcacaacttggacttccaccatgtgttttatatttcttttgtccaccctcctctaccctaagaaagagctccctaccctttaacggataggcagctttctttcccctctagaacagctcaaagatgttgcttatggcacccgaccgttgtcgttatgtttggaaacactgccagcccatggagatgaggataaagtggatatttctctgctgcatcagggtgagaatctttttgaactgcacatccaccaggccttcctgacatctgccgccctagctcaggctggagatacccaacctaccactttctgcacctattccttctatgactttgaaacccactgtaccccattatctgtggggccacagcccctctatgacttcacctcccagtatgtgatggagacagattcgcttttcttacactaccttcaagaggcttcagcccggcttgacatacaccaggccatggccagtgaacacagcactcttgctgcaggatggatttgctttgacagggtgctagagactgtggagaaagtccatggcttggccacactgattggtaagtgccgttggcttcctgcggctcctaagcaccaatgcagaatttcccaaagcctacagttgcttttctggtggtttcttattttcttcctttgtcttgttcttgatccttgccacaccatctgtattccccctgctttcacactttctgctacccaggagctggtggagaagagttcggggttctagagtactggatgaggctgcgtttccccataaaacccagcctacaggcgtgcaataaacgaaagaaagcccaggtctacctgtcaaccgatgtgcttggaggccggaaggcccaggaagaggaggtgagaaaaaagatgtgccgaggcatctcagaggagcctcagccaaacagctcatgagcacagttcagtcttccactctcaataagtgtttgttgaatgtgaatgaaagagaaaactgtcacaccacaactagtctggattattcccttggtcaggcttgagtctgaaatgaaagtatgcctttggagcgagctacatccttcatccttgctgtgaacagaatagcttctctgtgccattctctaagttaagtcgtgagtgccagtatctccctgaaataactgccagagccagtttgcaggcaggtgaagatcattaggtttcttcctgatccagttgggatagctgttctctagatcatagctcttcctcaccacagatcctaggcttcacctacaacagtctcaagctgcccttttcctcaatccatgaccaacatctttccagttcagatcggagtcttgggaacctcagaacgagctgtggattgaaatcaccaagtgctgtggcctccggagtcgatggctgggaactcaacccagtccatatgctgtgtaccgcttcttcaccttttctgaccatgacactgccatcattccagccagtaacaacccctactttagagaccaggctcgattcccagtgcttgtgacctctgacctggaccattatctgagacgggaggccttgtctatacatgtttttgatgatgaagacttagagcctggctcgtatcttggccgagcccgagtgcctttactgcctcttgcaaaaaatgaatctatcaaaggtgggagttcgaggttattacatcttcacgccctcttcccagtgttgtctccctgtcctgattctacttttctttgattacttgcttgaaacagtctctcttaaaacctgaagataaaggatttagaatattgtcaagagcaacagagcagaagacttagagcctcactacttgtgtggaaacactggcttcttctgcttcttttcagccacaaagacaacattcctaagtgggtagagccagcaacctgaattctatacctctgtatctgaataaacttctttgttttttgagatggagtttcgctcttgttgcccaggctagtagctgggattacagacatgcgccaccacacccggctaatttttgtatttttagtagagatgggatttctccatgttggtcaggctggtcttcaactcccgacctcaggtgaacctcccacctgagcctcccaaagtgctgggattacagacgtgagccaccgcgcctggctgaacaaactttttcaagctctgtaatgctgtctagtatctgtctttactaaaggcctgttgtttcttagtgcatgactacatagatatctgattataaactgagaccttaacactcccccatcattctctcacttcttttaaacactggacacaagttagagagatttccacaccagatcatgacaaacacaaatttcttggattttttttttcctcccaatgtggagctgagctccatactgtctttcctaacttttatacctaggattgtgggggtgtaccaagaggggtcaactctttgactacagtcctgggagggtgaggtgggggtatccatgttttccttaggaagtggggatagctgcagtcagaaacaaccatatttaacaagattctggatgctccaggacatgtatgcagctctctcctcaatacaactgcttaaaaaaaggctgacacttctggacacaactcctttgccaaacaggggaggcagtataagccacctgttaatcagtgttacaaatcagacatctggcatttcgaaagagccattttgcttaagttttcttgggaccacttgagggtagaggtaacagttttcttggtacaactaaggcacagtaagcatttgataatagtaataataatgcagccttgttcattggctggatgactgatgacaagcaagctgtactccttttcatacacccttcactatctcttcctgaatcctagagataacccatcttccctgattaatattctaactgcactgctgtttgattttacttctgagtgtatcatcatcgtaattatttaatggatgttaattaattgctgataaaatatgttgaaattaaaaatgggaaggaagtagataaggtgctgacaaatgctcacttgcttatttcatgtgatcaggtcttattaatatctgtttgtttctcaggtgattttaacctcactgaccctgcagagaaacccaacggatctattcaagtgcaactggattggaagtttccctacataccccctgagagcttcctgaaaccagaagctcagactaaggggaaggataccaaggacagttcaaagatctcatctgaagaggaaaaggcttcatttccttcccaggtaactctccaggactccacaggtagcagatctctgccaatcctatggagcagatttgaaggagacagtattatagttgaagtaggtgcagtggctcacgcctgtaatcccagcactttgggaggccatggcaggcgaattacctgaggtcaggagttcaagaccagcctgaccaacatggggaaaccctgcctctactaaaaatacaaaaaattagctgggcgtggtggcacatgcctgtaatcccagctactgggaggctgaggcaggagaatcacttgaacctaggaggtggaggttgcggcgagccgagatcacgccattgcactctggcctgggcaacaagagcagaactctgtctcaaaaaaaaaaagaaaaagaaattccctctgtgagtgtcatgtgtcctgtgaacttaatatatatccctcataatgccatgagactactgatggagcgaaagcctgggttttactgcggaaaagagagagaaatagcatttctcagctccatgaggagagaaatgaagtctaacactagttcccaaatccctttcttgtgtttctaggttgttaaactaccagcttgtaatgctatctctgatctttctattcaggatcagatggcatctcctgaggttcccattgaagctggccagtatcgatctaagagaaaacctcctcatgggggagaaagaaaggagaaggagcaccaggttgtgagctactcaagaagaaaacatggcaaaagaataggtgttcaaggaaagaatagaatggagtatcttagccttaacatcttaaatggaaatacaccagaggtaagaccttaaaaactctgaagcactaaattgtgggttgtagtgtccccagatgtattattctcagaggtagaagcagaagcagaagcagacacacaagataagcactaatcggccgggcatggtggcttcggcctgtaatcccagcactttgggcagttgaggtgggcagatcacctcaggtcagcctggccaacacggtgaactcctatctctgctaaaaatacaaaatgaggcctggtgcagtggctcacgcctgtaatcccaacactttgggaggccgaggtgggtggatcacctgaggtcaggagttcgagaccagcttgaccaacatggtgaaaccctgtctctactaaaaatacaaaaattagccaggcatggtggtgtgtgcctgtaatcccagttactcgggaggctgaggaaggagaatcacctgaagctgggaggtggaggttgtggtgagctaagatcgcgccattgcactccagcctgagcaacaagtgagaaactccatctcaccaaaaaaaaaaaaaaaaaattagccaggcatggtggtatgtgcctgtaatcccagctactcagtcgggaggctgaggtaggagaatcgcttgaacccaggaggcggaggttgcagtgagctgagatcgtgccactgcattccagcctgggcgacagagcaagactccatctcaaaaaaataaaaataagataagccataatcatagctaattgtggctagcttgtgtttccacaaacacaagtagtttaacaaacccctggactgttcatttcaatgtaatttaattcagcatattatgtactctacagtttatgcttaaagttttaatactatatatatttttaaacaagtactcactttttttttttttttgagaccgagtcttgctctgtcgcccaggccagagtgcaatggcatgacctcggctcactgcaacctccgcctcccaggttcaagcaattctgctgcctcagcctcccaagtagctgggattacaggcacgtgccaccacacccagctaatttttgtatttttagtagagacgaggtttcaccatgttgatcaggctggtctcctgacctcaggtgatccgcctgcctcagcctcccaaagtgctgagattataggcgtgagccaccatgcccggccaacgagtactaacttttaaaaattaaaaagagccagtattgtctgggcatggtgactcacgcctataatcctagcactttgggaggctgaggcatgcggatcacatgaggtcaggagttcgagaccagcctggccaacatggtgaaaccccatctctactaaaaatagaaaaattagtcaggtgtggtgacgggctcctgtaatcccagctactcaggaggctgaggcaggagaattgcttgaacccaggaggcgaaggttgcagtgagccgagatggtgccactgcactctggcctgagtgacagagggagactctgtctcaaaaaaataataataataaaaattaaaaaaataaaaagagctaatatttaaaaagaaggcaggaaggaaggaatgaagaaagaaaaccaagatattaccagctatgtagtattgttgttcttattctgaagcaggtgaattacactgagtggaagttctcagagactaacagcttcataggtgatggctttaaaaatcagcacgaggaagaggaaatgacattatcccattcagcactgaaacagaaggaacctctacatcctgtaaatggtattgtcttttaaaatctattttttttcctagcactttgggaggccgaggtgggcagatcacgagatcaggctttcaagagcagcctggccaacatgatgaaacccgtctctactaaaaatacaaaaattagccgggtatggtggcaggcgcctgtaatcccagctacgtgggcggcggaggcaggagaattgcttgaacccaggaggaggaggttgcagtgagccgagattgcaccactgcactcctccagcctgggcgacagagcgagactccatctcaaaaaaaagaaaaaaatatatattttttctgtttaatcatttaattgttttgccaagctagttatttacttttctccttcaccttagaatgctaaagttttcatggaaaattagtatgtaagacctgaggcccagttttgtgttacaagtgtgatggttgggttaaccaaggctggaattcttaaataagtaactttctcagtgtttataaaatgttattttgccccaggatttttttgttttgttttgttttgtttttgagatggagtctcattctgtctcccaggctggagtgcaatggcaggatctcagctcactgcaagctctgcctcctgggttcaagcaattctcctgcctcagcctcccgagtagctgggattacaggtatgtgccaccatccccggctaattttgtatttttagtagagacaggttttctccatgttggtcaggctggtctcaaacttctgaccttaggtgatccgcccacctcagcctcccaaagtgctgggattacaggcgtgagccactgcacccgacctagttttgattttctcattaaaactgtttgttggctggttgtggtggctcatacctgtaatcccagcactttgggaggcatgggcgggtagatcacctgaggtcgggagtttgagaccagcctgaccaacatgatgaaaccccatctactaaaaatacaaaaaattagctgggcatggtggcatctgcctgtagtcccagctactggggaggctgaggcaggagaattgcttaaacccaggaggcagaggttgcagtgagctgagattataccactgcactccagcctgggcaacagagcaagactccgtctcagtacaaaaaacaaaaaacaggacagtgtttgtcttgattattgagtttttggcaccccttcaaattttatgcctaaggtcagtgcctcacatgccttcctctacttctgacagtggtcagaatagtggttactgctaggagaaggggaagagggttatcaggaaaggacaccctttgggcatctggagtgctaccagtgttctatttcttggctgaacggtgatagagatgttcattttacaacaatttaataagttgaacatttatatttcatgggcttttctatgtgcttgaaaaatttaataatgagaggaaaaatataaaggtagatatggaaatattatgaaaagagagtctttactacttaaaaaagctttttttctaaatctctagaagcattttatatatatataattttttttttttttttttttgagatgaagtctctctctgtcacccaggctggagtgcagtggcacaatctcggctcactgcaatctctgcctcccaggttcaagcgattctcctgcctcagcctccagagtagctgggactacaggtgtgccccactatgcccggctaatatttgtatttttagtagagactggatttcatcatgttgtccaggctggtctcgaactcttgacctcaagtgatccacctgcctcagcctcccaaagtgctgggattacaggtgtgagccaccacgcttggcctaaaagtataatttttaagcttttgaatgtatttggcataacttcttaaatgggaagagcataaatgatttttctcatgagaaggataatttttctattgattatgtaatctgatttctccgtcaaagtttactcaatgtaaggaaggttaacaagaataaccaagcccaaaatttcccagagccaaatttacatgactggcaagaaatcctggttataagagaacaattccattcttatgatttgcagacaatggaatattatttagtcataaaatagtagaataaatagtaacagtgtatctagatagcttcagtgtatccagacctgaatgcggggttccagttatctccatactcccaatttacatttcttcaggtatttgattgagtataatctatatccactagctttttctccttgtagaatgtgaaatatgggaccagaaggtaatctaaacctcatgtactatatggtcatctatttatagtcataaataataaaagaagactatttctgtggaagcctaattgttagttattgttttaatatcgctgttctccatgaatttcaaaagatcaagactggccaggcgcagtggcttacacctgtactcccagcagtttgggaggcagaggcaggcagatcacctgtcaggagcttgagactagcctggccaacatggtaaaaccccgcctctactaaaaatgcaaaaattagccaggtgtggtggtgggtgctggtaaccccatctgagaagctgaggcaggagaatcgcttgaacctgggaggcagaagttgcagtgagctgagaccatgccattgcactccagcctgggcaacaagagcaatgcttcatttcaaaacaaaaacaaaacaaaaacctcaaaagcaccagttagtactcgcaagaagctaaaatctgcctggtttcagatgtctgagtggagctatcaagcaggatgctgtagttgttgaaaaagaagcttattaatcttttagacaaagatctaagggtattaggtaaaggccatcaagaaatgaaaagggcctgattttaaggccatttccacatatgtagacaaagccttgtgtcttttagcagcctttgcttttgctgcccgctcagaccttttccctttgagacctcagtgaaacagacaacccaagactttgaaattttacagaagaggcacagcttgccatccagttatctaatgctatgtaacaatctactccaaaacttaatgacttaaaacaattgtcatttctttggctcactactcggcatgttaggcaggtctcatgaagaaggctcatttctcctctctcaatgtggcattagatggggtagctcagctagggggctgatgggttcatcttgcaagatagctcaccctactagctgatcaggtggtcctggctgtcagtggttgcttgggcttcctcacaggttggtagctgagttccaagacagcaaggtacaagtccatggcatttttgtgttctggccttagaagtcacatagcatcactcctaccgtactctttcagttgagacagtccaaaagatccaccttaattgaaggggaggggacaaagaccccaccactcaataggagcagcgtcaaggtcagtcgcattgtaaggagagcagctgagataggagagaccatttgaggccacctttttttttttttttttttgagacagagtctcttgtcgcccaggctggagtgcagtggctcgatcttggctcactgaaacctctgcctcccggattcaagcaactctcctgcctcagcctcccgagtggctgggaccacaggagtgtgccaccaagccaggctaattttgcatttttagtagagacggggcttcaccatgttggccaggctggtctaaaactcctgacctcaggtgatccacctgcctcgaactccaaaagtgctgggattacaggtgtgagccaccacgcccagccagagaggccatctttggaaaatacaatctgccccacccaattgcacagctttacctcaagcttggccattttcttcagcccccacaaaaggacttcctttcttccttccttactctcacccttccttcctgtcttccttcctttcttcctttctgtttttccttctttccctttctttttttgagaagtgaatcctgtatgtttggcaagcttctgaataagtgtacctttgaaaaagagggtttgattcttagtaagtgaaggcaaaatctagacactcggaactagtgaccagacagtggattggagatgtgtgtgctgggtcttttcttgggctaaagtgctttgaaacagttctataactgcaacctcttctctagcagacaaagaatcctctgaacaaggttctgaagtcagtgaagcacaaactaccgacagtgatgatgtcatagtgccacccatgtctcagaaatatcctaaggcagtaagtacactggagtaatcattgcatacgagataagacgataaataatgacagtggccagtcatgggggctcacgcctgtaatcccagcaccttgggaggccgaggcaggcagatcacctaaggtcgggagttcgagaccagcctgaccaacatggagaaaccccatctctactaaaaatacaaaaaaaattagccaggcatggtggagcgtccttgtaatcccagctactcaggaggctgaggcaggagaattgcttgaacccgggaggcagaggttgcagtgagccaagatcacgccattgcactccggcctgggcaacaagagcaaaactctgtctcaaaaaaaaaaaaaaaaaaaaaaaaagcaataatgacagtgtgcttagtggccacacaagtgaagggcaatccagttttaatgaagctgatggaaaatgcaaattgtttagttaaatttatgtttcgtgtgaatgaaggtcggctggtacagtcagataaaaggatcattttcttgagatagtgtaaatgatgacttgcttcaatacttctgtcctatctggatcctttgcctcttactcccatatcctccattgtgtcctgtaattcatgcccagcctgaatggtacccctgcctttaagtccatctaaggaaaacgggtttgctttgggagatggagtctggaagagaggacaggattcttcatgggagggctcatggagatcattccatttctgctgttttttactcaacctgtaattatctattaaacagttcagcctcaaagctctttcagaactgatttaagagacacgcatcaaaaaaatataaaaaagaaaaaaaagccggttgcggtggctcacgcctgtaatcccagcgctttgggaggccgagacgggtggatcacgaggtcaggagatcgagaccatcctggctaacacggtgaaaccccgtctctactaaaaatacaaaaaaattagccgggcgtggtggctggcacctgtagtcccagctactcgggaggctgaggcaggagaatggcgtgaacccaggaggcagagcttgcactccagcctgggcgacagagcgagactacgtctcaaaaaaaagagacacacatatattaataaatatccacacatatattcagtaatcattgtgttctaaccttgtgggttacacatgaggtagaaaacaattactcttaagtcgctgctgcctgacacatttgtaggtcctcaatatttgttgagtgagtgactgaataatagattcagagtgaattgatgattatgaacttcattagaaacattaaataagaatgtaggatgacctaaaaccaaggaggtagattgtgtaatataaagtctgttgtaagaaatcagaaaagggaatttatggtttcttttgtagaggttggaaaactcttccttgaaagctggaacatgtgcttgagaactgcaggaaaatgaaggatattggagtgaggagaaaaaactcaaagtcagtagacttaaacactgaatataacacatagttcaatttcagctgaggtgtggtggctcacacttgtaatcccagcactttgggaaactgaggcaggcagattgcttgaggccaggaatcaagaccagcctgagcaacacagcaagacaactgtctctacataaaatttaaaaactagctaggcgtgttggctcacatctgaagtcctaagtatttgggaggctgaggtgagaggattgcttgagcctgagagtttgaggctgcagtgagccatgatcttgccactgcactctagcttaggtgacagagagagaccctgtctcaaaaacaacagcaacgacaaaaccagttaagtttctctttgtctgaacttttatctatcatatctttttttagatattatgtagttatctgacaagtgtttgtaagacagactggagccacagaatgttggaattagataacacttctatattaccaaggtaaagaagattaaatgatgtgtacaggattattgagttagtgaaagagctgaaactccagttgaggtttttaaactgcgcaacctctcaagtaaccaaaaaaagcagccagctgatcagcaaactcatcttgaactgtaacaagccagccagatttcattaaaaacattacctaaattaaaggctcctaagtaagatatccttttagaaaacttccttgtgtgccccaaagtgttacttgagaaattaaatatgagaaaggagcctatctaagcaaaaaattagtgttattatcaagttaaacgtacaacacaggcacatatatattaaattattgttatattccaaaatgtccaggcatgaaaggtagagggggttgaaagctcagagtcaaaacttgagttctgtcactcttctgcctggggtcagctgggataaatggaaatgcagtagagtgtaatgtttaagagcatggagatttggttgagacagtgatttagatcccagctctgctacttaactagatatacagctttgagagagttttttaacctctattaggccttgtctccttatctgtaaaatggtagtattaagtatacccatctgatactgatgtggcaagattaaaataagggtttaatacagtgcccgagacaaattaagccctaaatgatagtgaggatgagtgtgatgataatagtagtctcatttctctgacctactggagttctcaatgttaagctttttttttttttttttgagatagagtcttgttctgttgcccaggctggagtgcgtgcagtggcgcaatctcggcttactgcaacctctgcctcccaggttcaagagattctcctgccacaggctcccgagtagctgggaccacaggtgtgtgtcaccacgaccagctaatttttgtatttttagtagagacggagtttcactatgttggccaggctggtctcaaactcctgacctcaggtgatccacccacctcggcctcccaaagtgctggaatttacaggtatgagccactgcgcccggcctaggttaagcatttttttttttttttttttttttttagagtctcgctctgtcacccaggctggagtgcagtggcaccatcttggctaactgcaacctccgcctcccgggttcaagcgactctcctgcctcagcttcccaagtagctgggactacagacacacgctgtcacgtccagctaatttttttgttttgagacctagtcttgctctgtcacccaggctagagtgcagtggtgcgatatcggctcactgcaacctccgccccccaggttcaagcaattctcctgtctcaccctcccgagtagctgggactacaggcgcacgccaccatgcctggctaattttttgtatttttagtagagatggggtttcaccgtgttagccaggatggtctcaatctcctgacctcgtgatctgcccgcctcggcctcccaaagtgccgggattacaggcgtgagccaccgctcctggcctccctcttcttaacagttactaatgaggagggagcaatcattttcatttgctctatggtcccagattactgtttctttagcaatagtgaatatcgagaacctcaaaattttttctcttatcgtgtcaatttcaggtgtcaggaatttcctgacccttatgtatgccaggtagtaagttttggcagccctgccccccagccaaattaggtggcacatctgagctaataagccaaagggtgttatctggcactaatccttgcagggtttctgccagcaagttcaaatgagttgatatatatttcaatggttaatattactaattgcatactttctttgctgttcagccccaataaaattacataatggaattagctcatgtaaagaaagtattctgaatccaacaaaaaatattagattgaaccatatattgtcatactcatagataaaaaatggttgacaattgtcagttctgtatagtccaacctaatatgaatgaataaaacatctgtgtgtacttggatcaaattttaatcttattcatcctcccatttcaccattgttaccagaataaacttgatgtagtctgcatgaatatggacttctgattattgtcccaggattattagcaagtttaaaaaatttgctgggtgtggtggctcacgcctgtaatcccagcactttgggaggtcgaggcgggcggatcacctgaggtcaggagttcgagacaagcctggccaacatggtgaaaccctgtctacaaaaatacaaaaattagccgggcgtgatgacgggtgcctgtaatcccagctactcaggaggttgaggcaggagaatcgcttgagcccaggaggtggaggttgcagtgagccaagattgcaccactgcactccagcctgggcgacagagcaagactctatctcaaaaaattgttttgttttgtttttttaactaggcaggtgtggtggctcacgcctgtaattctagcactttgggaggccgaggtgggctgatcatgaggtcaggagatcgagtccatcctggccaacatggtgaaaccccgtctctactaaaaatacaaaaattagctgggcgtggtggcgcgtgcttgtaatcctggctactcgaaaggcggagaaaggagaatggtttgaaccaaggagtcggaggttgcagtgagccgagatggttcccctgcactccagcctggtgacagagcgaaactcggtctcaaaaagaaaaaaaagaaaaataattttagatgtacaggaaggtgctatgtaatgtttatttagttttactcttttttcttcttttttggtaatgttatgaaacatgtatttttcaatcaataatgttttggggttctatccatgtcgatatatttagctttttatagttccttcgtcttaactgctgatcgatattgcattaaaataatacatgacctttcgtttagacagaactctaatgggtaatgattgagatttcatactgtgtgccaagtgcttgatattcatgactctctcgggcttcacagcagccttatgagttattctttccttcaagtaattatgaagtgcctgttttagtaactgccgggctctgtgggcacaaaatggtggataagacagacttggtctcttctctcttgaatcttacatactactgagggaaaatatgtacatcagtgagcaaataagtaaagcagatagctctgagattctaagtactatgaaggaaataaatagggcgatataatagcaatgcgaggagttgaactaggataggtgttgaggaaagatttctctgaggaggggacgtttgaactgaaatctgaagaacgagaagggaagagctacccatgtactgggtagactgtactcatctcaggcaaaggaattggtaagtgtaaaggccctgaggtaggaaagagtttgatttacctgaggagtgggaaatcaaaagaaaattaaagtttctcttgcacacatgtatattattattcccccaccccctttcaaaggaggacagtgaagtctagggagaagagcttgctcaagggaatatttaatacagttttactgagtgtatactgtgtgccagacattatgccaggcattgtgccaggcactagatactcggtagagactttaatggggccgggcgcaatggctcacgcctgtagtcccaacactttgggaggccgaggtgggtggatcacttgaggccaggagttcgagaccagcctgggcaacatggtgaaaccccgtctctactgaaaatataaaaattagtcgggcatggtggcacatgcctgtagtcccagctactcaggaggctggggcaggagaatcgcttgaacctgggagtcagaggttgcagtgagccgacgtcgcaccgttgcactccagcctgggcaacagtgctagactccatctctaaataaataaatacagattcccaggagccactctagacagtctgatataacacagaggcttttatacattttttatagcaatcactatgagaaatacatttctgcagtatccaatactcttataaaagaacaagtttcaagaaaccaggcttactattaacatttgccatgcattctcctattccactagatagtgtcttatcctgtctatcctatcctattgtttcttttttaaaaagctagtgaaacccgctaatctgacccatcaaagtgtcaaaaaaaaaccagatttttcaaaacactgtatagtcaatagttttcttgatgtttgggagagttggatgttatgggagggttattaagagaaaaacatcaaatatcgtttttttgtttgtttgtttgttttttgagacccagtctcactctgttgcccaggctggagtgcagtggcactgcaacctccacctcctaggttcaagtgattctcatgtcagcctcccgagtagctgggattacaggcatgagccaccatgcctggctaatttttgtatttttaatagagatgcggtttcaccatgttggccaggctggttttgaactcctgacctcaggtcaactgcccgcctcggcctcccaaaatgctggtattacaggtgtgagcctctgcaccccgccaaatatcttcatttttaagaagcaccccagatgattctgatgcagaatcattgagagatcttgcctgctgaatttcttaggggcaggcacaggagctccacttgctttctaagagaagaaaagatggggtaagagccggtctttggagaagtaagggcattggcctggccagctagtgaaaagaagcatacaggagggcactcacagatagaggggagagcgctatggctggtagggaaccatcctggattgactcattactggtgtcacgatactgacttgcctgccacactgtggaaggaggagacttctgttggccttggtgtacttctggaaacttcctcctggtatccctgatgccaacatggacacagggacaattaaaagaaaggacagggtgatggcagcgactgtgaagtgggattgaaaatattggagttcctggccaggcgcggcggctcacgactgtaatcccagcactttgggaggccgaggcgggtggatcacgaggtcaggagatcgagaccatcctggctaactaaaccccgtctctactaaaaatacaaaaaattagccgggtgtggtggcgggtgcctgtagtcccagctactcgggaggctgaggcaggagaatggcgggaacccgggaagaagagcttgctgtgagccgagatcgtgccactgcactccagcctgggcgacagagggagacactgtctcaaaaaaaaaaaaaaagactggagttcctgtgggagggcagggtggtctggtggcctcctcagtggcatgcacttgagtgggcatgggaagccctgggcagctctttgctatagtggctgaagcagctactgaatctccagtatcagtcaggaggtcttttaggtcctaacctcaggaaaatactagcttggttttcatgaagaacactgtggccagttgcagtggttcatgcctctcatctcagccactttgggaggctgaggtggacagattgcttgagtccaggagttctagaccatcgtgggcaacatagcaagaccatatctctattaaaaaaataaaaataattgtccctatgtggtggtgtacctgtggtcctagctacttgggtgactaaggtgggaagactgcttgagatcaggatgtcaaagctgcagtgaaccatgatcacacaactgccctccagcctgggcaacaaagcaagactctgtctcaaaaaaaaaaaaaaaagttgagaaatagctgtttagaaatttatttatttgtatataatcatcgggtacaagcacagttttgctgcatttatatattccactgtggtgaagcctggagcgacgcacattgttcccaccaagcaacctcccatcatccaccctccccgccgctccgaatcagacatttttttttattctttctatatgtggagatgactgagaaaggctgtcctggagaaatgatccactggactgtgagagagaagagctgggttctctttataaatttcctatcaattaactatggcaattaagtcaagttgtcttttgatgccagttttacctataaaaggattctcagggaataatatagtagatagattatacctatggttgatttctagagagtaccgtaatgggttaattggatggcgtataagcacttggagcctcactaacctttaggaactaaataaacattttccttatcaggattcagagaagatgtgcattgaaattgtctccctggccttctacccagaggcagaagtgatgtctgatgagaacataaaacaggtgtatgtggagtacaaattctacgacctacccttgtcggagacagagactccagtgtccctaaggaagcctagggcaggagaagaaatccactttcactttagcaagggtgaggcatcctgtgtggttactggggtgaggaagtctgatgaacattgagactgagggtcagaattactctggatttttgtggggtgaatccagccatttcactttattattttattgttcaaagtgttgtgtgcatgtggtttaaaaacatcgaatggggctaaacattttacatgaagcaggcctttgtcccagctcttcacagatcacttcgcctgttcccacccttcctcaatccacggcttcccacatttcagctatatttatttttactttttgaggtggagtctcgctctgttgcccaggctagaatgcagtggtgtgatcttggctcactgccacctctgactccgagattcaagcgattcacgtgactcagcctcccaagtagctgggattgcaggtgtgcgccaccgtgcctggctagttttttgtgtttttagtagaggcggggtttcaccattttggccaggctggtctcaaactcctgacctcaagtgatctgcctgccttggcctcccaaagtgctgggattataggcgtgagccaccaagcccatcctatctcagccatttcttctgttatttacttccatcatatttctgagtattgatttttgttcttcctcttttcctgtttttttttttttttttttttttttttttttttttttttttgagatggagtctgaacatgttgctcaggctggtttcaaactcctggactcaaatgattctcctgcctcagcctcctgagtagctggaattacaggcgtgagccaccatacctggcttctgagtaacatttctattgcaatctcctgattcaccggctttagacttcctatctcggaccttaaaagttagctcttttgcactacactcatgtccctttccttcccatcgtaattgtatcataatttttatttaaatccatttaaattggttctgttattatggatatgtaaatattaattcttgcagaaccaagtagtatgcaatgattatatttctttacacgtattttttgcagcaatttttcattcgccttattttcattatacatattgtaattattttcgtgtccttcaacagtcttcccaaattttgaaataatcaaacctgtcaaattatctactcatctatttttttcctgaagacctctctccatcctcttgttctgctctagcccactgtttcattattactgctgctcatggagaatacgatcaaattctctcctataccagatttcttatctcctggttatcctctaatttattttcttattttaatggatcatattttcagtagtttttaaagaaagggcatatcacaagtgaaaatttgagaaagtcgtgcatgaaatctttttttcctaccctcatatttgattcaagtgtggaaatctttttcattcagaatttcgaaggagcctgggtgcagtggctcatgcctgtaatcccagcactttgggaagccaaggcgggcagattacttgaggtcagaagttggagaccagcctggccaacgtggcaaaaccctgtctctactaaaaatacaaaaattagccgggcatggtggggtgcacctgtaatcccaactactcgggaggctgaggcaggagaatcgcttgaacttgggagatggagactgcggtgaaccaagatcacgccactgcactctagcctgacacagtaagaatctgtcacacacacacacacacaaatgattttcaaagcagttggtccatgttattctagatccaggcaaggagtctaatctttttatgaaaactaccatgaataccactaatgaaagtcttggggctcacactgcaacagtatatgattctttgcttttttctcttacccttaatacagtaatagacctggacccacaggagcagcaaggccgaaggcggtttctgttcgacatgctgaatggacaagatcctgatcaaggacagtaagcatctgctttccactttgaaacaaaggagatattgagacagaaattcaaaagtttgagtttggttttgtgctgatgctgaatattttaataacttttttgagttaatttactcttaatgaatttcctatgtacttgagtataatttatatttgtgactacctaatccattacctaatcttataggttatttatttatttatttatttatttattttcgagacagggtctcactctgtcgtccaggctagagtgcagtggtgcgatcttggctcactgcaacctccacctccccaggctcaagggattcttgtgcctctgcctcccaagtagctagggttataggcatgtgccaccatgcctggctaattttttgtgtttgtagtagagatagggttttgccgtgttgctcatgtctggtcttgaactcctgcgctcaagcgatctgccctcctcggcctcccagagtgctgggattacaggcgtgagccaccgtgtccagcccatagtcttataggtttagttcatttctcacccatgccagcctgatgggccctttttttgtagcagcagtttacttgaatattgacaatgcccaaatggaataacaaaaagtgttgacattcttcttttttttgagacagtgtctcactctgttgtccaggctggagtgcagtggtacaatcttggctcactgcaacctccacctcctgggttcaagcgattcttctgcctgagcctcccaagtagctgggatgacaggtgcacgccacttgcctggctaatttttgtatttttagtagagacagggttttgccatgttggccaggctgatcccaaccccaggtgatccttctgcctcagactcccaaagtgttgggattacaggcgtgagtgaccacacctggtcaacaggaattttttgatgttgacataactaagtgaattttagatctcctttaaagttttaggaaagctggttgtccttattattccaataatctgaagaaggcctcctttcagagtttccagataaaatgtgggacatacccaaaaaaaaattatttggtcgggtgcagtggctcacatctgtaatcccagcactttgggaggctgaggcgggcagatcacttgaggccaggagtttgagaccagcctggccgacatggtgaaaccccatctctactaaaaacacaaaaaaatcagctaggcatggtggcacatgctggtaattctagctactcaggaggctgaggcatgagaatcatttgaatttgggaggcggaggttgcagtgagctaagattgtgccactgcactccaacctgggtgacaaagcagactctgcctctaaggaaaaaaaaaagttatttgttgtttagctgaaattcaaatttaaataggcatatggtttttgtttttgaaatctgttatccataccgcctgtgcatgtgtgtgcataagaaataatatggggctggtgttttatcttatttttaatttttttgtttgtttgttttagagacaggatctcactatgttgcccagctggtctttcagctcctgggctgaagcagtcctcctgccctgcctcccaaagtgctgggattataggcatgagccactgtgcccgacctggtgttttaattactttttgaaaggcccaatacttttgtttcatctgcttttactttgtctttggttagtcatagaaagaactgaaaaaggagccagatgaaataaacagtgactctgacttcagcatcactgtgggcttaaacagatgtaagcttacagagaacttttggacatggaaagtgatttggttctttcctttctgtgctaatgtcaaatttagctttcacttttttttccccagcatttccagaactctctcttcctttattcccttacagtgataatcattttctactcaattttagattcgattggtattacctttggctttctttttgccagtatggtctagcagacagagcaggctttgtaatcagaccaaccttgtttttattccagactctttgacttactagctctttgatctttttgatattacttaatttgaaggctcttgtgagaataaaattgagctaatatagtttacataaagcacttggtattgtgcccggcacattgtaatgctagttatcatccctttcctatgcaaattgggatgagggagtcagcattatcacttcgcattgttgaagttctcaataatgacatagaaacatagttacaaatgaatattgcctaatgggctgagaatggatccctttaaagtaattcctttgtttcagtttaatcatatttagctgtgcttttaaaagcttgaatttttagtcctattcctggcactctgtattagctaccaatatttgcttttaaaaattaataaaaatatgaaaaatcaagaataggcaaatccagagagatagaaagtagattagtggttcaggagctagggaaggagaatggggagtgactgcttaatcagtacagggtttctttttcttttttcttttagagactgggtctcgttctgtcacccaggttgaagtgcagtggcatgaacacagcccactgcatcctcgacctcctgggctcaagtgatctcacctcagccttccaagtagctgggactataggtgtgtgccaccatgcccggctaattttttattttttttgtagagacggggtgttcctatgttacccaggctggtcttgaactcatgggcacatcccatgatgttccctcttctaaaaggactgttactgcttaaattataccaattcctgacttttttgcttattgtcattttgtaaaatggaggcaagggaaaagtgattcagagaagacgttgtattgtttatgattacttttatccttattttatttttgaagcattaagagtatcaacagtgctgaattaaatgcaatttctttttagtttaaagtttacagtggtaagtgatcctctggatgaagaaaagaaagaatgtgaagaagtgggatatgcatatcttcaactgtggcagatcctggagtcaggaagagatattctagagcaagagctagacagtgagtcatttttttttcagttctaattatttccaaggaaatcatcctaatagtgaatatattttatcttcaatacataattattactatgaagttgataagacacaaagtggattgaaatcttatccctacaactgtatttatttctggatccaacattaaagtagtcagttgtgtatttttacccccatatacctgattacaactagaattgattttgaatctacaatgtttgaaaaggagatttttaaaaagacaagttattttcatttcaaatttatacatcagaattttggacctctcttgagcattttcgtataggcagctgatgcccattctttatgttatcatgcatccagtcttttttttttttttttttttgagatggagcctcactctgtcgcccaggctggagtgcagtggtgtgatctcagctcactgcaacctctgcctcccaggttccagctgttctcctgcctcagcttcctgcctcagcttccatggtgtgccaccatgcctggctaatttttgtatttttagtagagaccgtgttttaccatgttggccagactggtctcgaactcctgacctcaagtgatctgcttgccttggcctcccaaagtgctgggattgcaggtgtgagccactgcacctggcccatcttgtctcttaaaaagacattaactgtctcctctttcctcacattcactggtcattaagtcttatccattctacttgtgaattgactatgctctccttactacaattttttttttttttttttttgagacagagtctctctctgttgcccaggctggagtgcagtggtgtgatctcggctcactgcaacctccacctcccaggttaaagcgattctcctgcctcaacctcctgggtagctgggactacaggcacctgccaccacgccagctaatttttgtatttttagtagagacgggctttcaccatgttgcccaggctggtctcgaactcttggactcaagcaatccaccctcttttgcctcccaaagtgttggcattacaggcataaaccactgcgcccggcctccttaaatataattactataatttctttcttttttttttttttttttgagatggagtcttgctcttgttgcccaggctggagtgcaatggaccgatctcagctcaccacaacctctgcctctttcttaatcaagcgattttcctgcctcagcctccctagtagctgggattacaggcatgaaccaccacgcccagctaattttgtatatttagtagagatggggtttcttcatgttggtcaggctggtctcgaactcccaacctcatgtgattcgccctccactcagcctcccaaagtgctgggattacaggcgtgagccaccgcgcccagccatataatttctaaactggtcttcctgccaccggtttcttctaccccatttccatctactatagtaaatacataatacatttgatcactgccttcttcttaaatccttttacagtttgctatagatcagcatgttttaaaaacatttgtatttgagtacctttagttgggactgcgctgtccagtcttcactgttcccattaccttacatagctgggatgtcacctatcttatctgctaggaccttcagacacttaagattatccactagatcaatgtttttcaaacttccagacacacaccccattagtggatgtgaaactgaattagtaaatcacaaggaaatttgaaaaatgcaaaccaaaactgtgggaaagaaaacaggaattaaaggccaggcgaggtggctcatgcctgtaatcccagcactttgggatgccgagatgggcggatcacctgaggtcaggagttcgagaccagcctggccaatatggtgaaaccccatctctactaaaaatacaaaaaaaattagccaggcatggcggcggacacctgtaatcccagctactcggaaggatgaggcagaattgcttgaacccgggaggcggaggttgcagtgagctgagatcaagtcaccgcactccagcctgggtgacagaacaagactctgtctccaaaaaaaaaaaaaaaaaaaagaaaacaggaattaagagtacatagcacatattgtcttgtgaaacttgttttatgtattgtttaatgaatcatggtataaaattattcttactgatcattataaacattttttgaggaatactcctcagaccctaaggtttacaaagttcaaatgttagataagattctaattatattcctctagtatctttccaactgtgatccttagtctttttcctcatctataaaacgggaataacagcagtctctatcttactgagttgtgaagattaaggaagcacttaaataagggattaaggggcttagggtagtgcctggcataaggcaagtgacgttatctttgtgggctattttccaactcactcctatccccattcctaaacatgctatgttcttcctgacctccatgccatttgtatgtgcacagggaaaatccacttaagacttttctggtgatttctccagaaatcctttccaatttgtccattctggtgcagatgcctcgttatgtccccaaagcaacttgtgcttccatttattatatagcacctatacactataccattttcctttctccttcactagattgagtcctcttatgaaatgggtaatttcattcatttagcatccccagtacctaacctgacaaataccaagtatcaaagtgttcaactgagtgatgctgtttttttccctttcccaacagttgttagccctgaagatctggctaccccaataggaaggctgaaggtttcccttcaagcagctgctgtcctccatgctatttacaaggagatgactgaagatttgttttcatgaaggaacaagtgctattccaatctaaaagtctctgagggaaccatagtaaaaagtctcttataaagttagcttgctataacatgaa

SEQ ID NO: 13833 - DNA, 2139 bp, Homo sapiens
gagaggttgactcgactactagacctcaagaataaccgtatcaagcagctggaagaaagagctccctaccctttaacggataggcagctttctttcccctctagaacagctcaaagatgttgcttatggcacccgaccgttgtcgttatgtttggaaacactgccagcccatggagatgaggataaagtggatatttctctgctgcatcaggcccctctatgacttcacctcccagtatgtgatggagacagattcgcttttcttacactaccttcaagaggcttcagcccggcttgacatacaccaggccatggccagtgaacacagcactcttgctgcaggatggatttgctttgacagggtgctagagactgtggagaaagtccatggcttggccacactgattggagctggtggagaagagttcggggttctagagtactggatgaggctgcgtttccccataaaacccagcctacaggcgtgcaataaacgaaagaaagcccaggtctacctgtcaaccgatgtgcttggaggccggaaggcccaggaagaggagttcagatcggagtcttgggaacctcagaacgagctgtggattgaaatcaccaagtgctgtggcctccggagtcgatggctgggaactcaacccagtccatatgctgtgtaccgcttcttcaccttttctgaccatgacactgccatcattccagccagtaacaacccctactttagagaccaggctcgattcccagtgcttgtgacctctgacctggaccattatctgagacgggaggccttgtctatacatgtttttgatgatgaagacttagagcctggctcgtatcttggccgagcccgagtgcctttactgcctcttgcaaaaaatgaatctatcaaaggtgattttaacctcactgaccctgcagagaaacccaacggatctattcaagtgcaactggattggaagtttccctacataccccctgagagcttcctgaaaccagaagctcagactaaggggaaggataccaaggacagttcaaagatctcatctgaagaggaaaaggcttcatttccttcccaggatcagatggcatctcctgaggttcccattgaagctggccagtatcgatctaagagaaaacctcctcatgggggagaaagaaaggagaaggagcaccaggttgtgagctactcaagaagaaaacatggcaaaagaataggtgttcaaggaaagaatagaatggagtatcttagccttaacatcttaaatggaaatacaccagagcaggtgaattacactgagtggaagttctcagagactaacagcttcataggtgatggctttaaaaatcagcacgaggaagaggaaatgacattatcccattcagcactgaaacagaaggaacctctacatcctgtaaatgacaaagaatcctctgaacaaggttctgaagtcagtgaagcacaaactaccgacagtgatgatgtcatagtgccacccatgtctcagaaatatcctaaggcagattcagagaagatgtgcattgaaattgtctccctggccttctacccagaggcagaagtgatgtctgatgagaacataaaacaggtgtatgtggagtacaaattctacgacctacccttgtcggagacagagactccagtgtccctaaggaagcctagggcaggagaagaaatccactttcactttagcaaggtaatagacctggacccacaggagcagcaaggccgaaggcggtttctgttcgacatgctgaatggacaagatcctgatcaaggacatttaaagtttacagtggtaagtgatcctctggatgaagaaaagaaagaatgtgaagaagtgggatatgcatatcttcaactgtggcagatcctggagtcaggaagagatattctagagcaagagctagacattgttagccctgaagatctggctaccccaataggaaggctgaaggtttcccttcaagcagctgctgtcctccatgctatttacaaggagatgactgaagatttgttttcatgaaggaacaagtgctattccaatctaaaagtctctgagggaaccatagtaaaaagtctcttataaagttagcttgctataacatgaa

SEQ ID NO: 13834 - DNA, 29938 bp, Homo sapiens
atgcttattctgcagcgcaaaatcaacgtgtgttatcaggtgcaaggaaagatggtacaggaaggggatggataacaggaacgtgggaaccactcacaggactgggaatgaagcaagacctaagtttccagggctgataccaggtgatgtgctatcctgagcaaacacacaatggctgtcctttgaagaacttgaggactcacacatgcccacggcaccttggcactaggagccagtgatggggccagcccatgccaatggcaagcgtaaggcttctgggttcaaattttgccagtcctaggaaccaccctacctcaatgatagcacaactagtcttggaggggtctgcaaggaaatcaaaccttcttctagtgggtgaacctgcccagctaaggatagcagtcttcttgacctagccagtgccacattttttatgctctttggttttaggccactgagatagaaaagttcagacattattttgtttcaggaggaactggaggcaatgatgacaaaagctgacaatgataatagagatcacaaagaaaagctggagaggttgactcgactactagacctcaagaataaccgtatcaagcagctggaaggtattttaagaagccatgaccttccaacatctggcaagtcttagtcctttgttctcctcacttcgggacccttccacagctaacgcctgtgttccactctgtgtacttgtcaagaagggtgcctctcatacccttagcatatgacttatccttcttgttctttatcctatcatttttgttgtttttttttgcttgtttgcttttgagatggagtcttgctctgtcactcaggctggagtgcagtggtgcgatcttggctcactgcaacctctgccttccaggttcaagcgattctcctgcctcagcctcccaagtagctgggatgacagttgtccaccaccatgcctggctaattttttgtatttttagtagagatggggtttcaccatgttggccaggttggtctggaacttctgacctcaggtgatccacctgcctcagcctcccaaagtgatgggattacaggtgcgagccactgcgcccggcccatctttgttgttttaatacatgttagcagcttctttccctccatcatgtttttctgatttctctgtagagtttcaagtgggcccagcaattgcttccaggggcttaattctgttgtgagaatgagtatcactgttggctctcagggtggtggtgtaacacacaatctctctctctctctctcattctttctctcttgctcctctcccctgtccctctctcctagtcactgtttcctcaaagcagttttagtcggataatagaacttcatcactcatctcctgttattcttgtcagtgatttctctcttaaaagctctaaaatctttgttgcaatttgaggatgctgacagtgacagggcagctggctggacactgaatgcaagtttcatattgtggtgcctcctatacttagtgtagtcactgctgaccagagcctggtctcaggcttgtttgtcaagacacttggctttgttattatacccagtggtgaaagatctgactcacgaaaaccaaattaaccagaagctgatatttaaacccaaatgtttgttattttacaatagtggctattccactgcttccatgaggaacttggaaccacagttcagggcagccctctttcgggaagcaaaatcagtaagtaggtttcttagtgagcatggaatagaataaagggacatggctgggcacggtggctcacacctgtaatcccagcactttgggaggacgaggcgggcggattgcctgaggtcaggagttcgagaccagcctgaccaacatggtgaaaccccatcgctactaaaaatagaacaattagctgggcatggtggcgggcacctgtaaccccagatacttaggaggctgagacaggagaatcgcttgaacccgggaggcaaagttgcagtgagccgagaccaggccattgcattccagcctaggcaacaagagcgaaactctgtctcaaaaagaaaaaaaaaaaagaataaaagcacataagtgtctctgggccgtgatttatccatgtcagcgtgagtctgataaaagatcactgcttctacctacgtctgaagatttatttgctttagctaatagttctttgatcactggtaagactaaagagtttttctatgttcaccagttatttgtattattccttttgagaattgaccgttcctatcctttgcctacttcttaacagtatcctattgatttatagaaattctttttatgctgagattattactcctgcatcatgtaatgcaaaattttaagtatattatatttaattatattaatcttgttaattaagaaagtagtctccttattcgtgtgtgtgtgtgtgtgtcatgaagacattccgatgtgtccagaatattttattctactgctttaactcttaaaataggaccttcggcagcagcacactgtgttgactcaaatattccccaatttgaagcaggctatatatcaaagtttctgattggttggacttgggagataatacccagatttgctagactgtctacctatctttgcgtcccactgccaatatttcctacctctttccagtaagtctcttttcccactttttactccattactctttaacttataatgtactttttgccttcttatgttgaaaccaaattctgaacagaatgaaagatctcctgactgacctggctagagaaggagaagcatttcttggtgggactcaatgtaatgtcatagacactatgtctgcaacttgctattatctccacggccaatataccaaacttgtagaaatattcatgtttttgtgtttctagtacttctcttatggaattaccagttaatcatagggccacgatgtacaccaaaacaatgtcatatataagataaaatgtgcccccagtgttttcctaagtttagcatctactttccagtcactccttttgtaccttctccctaaagctggcattggattatttggctatcggaattcaatgctcctggttgtccttctgttgcttttccttttgaatcacgtggtttcttgaaataatcacaacttggacttccaccatgtgttttatatttcttttgtccaccctcctctaccctaagaaagagctccctaccctttaacggataggcagctttctttcccctctagaacagctcaaagatgttgcttatggcacccgaccgttgtcgttatgtttggaaacactgccagcccatggagatgaggataaagtggatatttctctgctgcatcagggtgagaatctttttgaactgcacatccaccaggccttcctgacatctgccgccctagctcaggctggagatacccaacctaccactttctgcacctattccttctatgactttgaaacccactgtaccccattatctgtggggccacagcccctctatgacttcacctcccagtatgtgatggagacagattcgcttttcttacactaccttcaagaggcttcagcccggcttgacatacaccaggccatggccagtgaacacagcactcttgctgcaggatggatttgctttgacagggtgctagagactgtggagaaagtccatggcttggccacactgattggtaagtgccgttggcttcctgcggctcctaagcaccaatgcagaatttcccaaagcctacagttgcttttctggtggtttcttattttcttcctttgtcttgttcttgatccttgccacaccatctgtattccccctgctttcacactttctgctacccaggagctggtggagaagagttcggggttctagagtactggatgaggctgcgtttccccataaaacccagcctacaggcgtgcaataaacgaaagaaagcccaggtctacctgtcaaccgatgtgcttggaggccggaaggcccaggaagaggaggtgagaaaaaagatgtgccgaggcatctcagaggagcctcagccaaacagctcatgagcacagttcagtcttccactctcaataagtgtttgttgaatgtgaatgaaagagaaaactgtcacaccacaactagtctggattattcccttggtcaggcttgagtctgaaatgaaagtatgcctttggagcgagctacatccttcatccttgctgtgaacagaatagcttctctgtgccattctctaagttaagtcgtgagtgccagtatctccctgaaataactgccagagccagtttgcaggcaggtgaagatcattaggtttcttcctgatccagttgggatagctgttctctagatcatagctcttcctcaccacagatcctaggcttcacctacaacagtctcaagctgcccttttcctcaatccatgaccaacatctttccagttcagatcggagtcttgggaacctcagaacgagctgtggattgaaatcaccaagtgctgtggcctccggagtcgatggctgggaactcaacccagtccatatgctgtgtaccgcttcttcaccttttctgaccatgacactgccatcattccagccagtaacaacccctactttagagaccaggctcgattcccagtgcttgtgacctctgacctggaccattatctgagacgggaggccttgtctatacatgtttttgatgatgaagacttagagcctggctcgtatcttggccgagcccgagtgcctttactgcctcttgcaaaaaatgaatctatcaaaggtgggagttcgaggttattacatcttcacgccctcttcccagtgttgtctccctgtcctgattctacttttctttgattacttgcttgaaacagtctctcttaaaacctgaagataaaggatttagaatattgtcaagagcaacagagcagaagacttagagcctcactacttgtgtggaaacactggcttcttctgcttcttttcagccacaaagacaacattcctaagtgggtagagccagcaacctgaattctatacctctgtatctgaataaacttctttgttttttgagatggagtttcgctcttgttgcccaggctagtagctgggattacagacatgcgccaccacacccggctaatttttgtatttttagtagagatgggatttctccatgttggtcaggctggtcttcaactcccgacctcaggtgaacctcccacctgagcctcccaaagtgctgggattacagacgtgagccaccgcgcctggctgaacaaactttttcaagctctgtaatgctgtctagtatctgtctttactaaaggcctgttgtttcttagtgcatgactacatagatatctgattataaactgagaccttaacactcccccatcattctctcacttcttttaaacactggacacaagttagagagatttccacaccagatcatgacaaacacaaatttcttggattttttttttcctcccaatgtggagctgagctccatactgtctttcctaacttttatacctaggattgtgggggtgtaccaagaggggtcaactctttgactacagtcctgggagggtgaggtgggggtatccatgttttccttaggaagtggggatagctgcagtcagaaacaaccatatttaacaagattctggatgctccaggacatgtatgcagctctctcctcaatacaactgcttaaaaaaaggctgacacttctggacacaactcctttgccaaacaggggaggcagtataagccacctgttaatcagtgttacaaatcagacatctggcatttcgaaagagccattttgcttaagttttcttgggaccacttgagggtagaggtaacagttttcttggtacaactaaggcacagtaagcatttgataatagtaataataatgcagccttgttcattggctggatgactgatgacaagcaagctgtactccttttcatacacccttcactatctcttcctgaatcctagagataacccatcttccctgattaatattctaactgcactgctgtttgattttacttctgagtgtatcatcatcgtaattatttaatggatgttaattaattgctgataaaatatgttgaaattaaaaatgggaaggaagtagataaggtgctgacaaatgctcacttgcttatttcatgtgatcaggtcttattaatatctgtttgtttctcaggtgattttaacctcactgaccctgcagagaaacccaacggatctattcaagtgcaactggattggaagtttccctacataccccctgagagcttcctgaaaccagaagctcagactaaggggaaggataccaaggacagttcaaagatctcatctgaagaggaaaaggcttcatttccttcccaggtaactctccaggactccacaggtagcagatctctgccaatcctatggagcagatttgaaggagacagtattatagttgaagtaggtgcagtggctcacgcctgtaatcccagcactttgggaggccatggcaggcgaattacctgaggtcaggagttcaagaccagcctgaccaacatggggaaaccctgcctctactaaaaatacaaaaaattagctgggcgtggtggcacatgcctgtaatcccagctactgggaggctgaggcaggagaatcacttgaacctaggaggtggaggttgcggcgagccgagatcacgccattgcactctggcctgggcaacaagagcagaactctgtctcaaaaaaaaaaagaaaaagaaattccctctgtgagtgtcatgtgtcctgtgaacttaatatatatccctcataatgccatgagactactgatggagcgaaagcctgggttttactgcggaaaagagagagaaatagcatttctcagctccatgaggagagaaatgaagtctaacactagttcccaaatccctttcttgtgtttctaggttgttaaactaccagcttgtaatgctatctctgatctttctattcaggatcagatggcatctcctgaggttcccattgaagctggccagtatcgatctaagagaaaacctcctcatgggggagaaagaaaggagaaggagcaccaggttgtgagctactcaagaagaaaacatggcaaaagaataggtgttcaaggaaagaatagaatggagtatcttagccttaacatcttaaatggaaatacaccagaggtaagaccttaaaaactctgaagcactaaattgtgggttgtagtgtccccagatgtattattctcagaggtagaagcagaagcagaagcagacacacaagataagcactaatcggccgggcatggtggcttcggcctgtaatcccagcactttgggcagttgaggtgggcagatcacctcaggtcagcctggccaacacggtgaactcctatctctgctaaaaatacaaaatgaggcctggtgcagtggctcacgcctgtaatcccaacactttgggaggccgaggtgggtggatcacctgaggtcaggagttcgagaccagcttgaccaacatggtgaaaccctgtctctactaaaaatacaaaaattagccaggcatggtggtgtgtgcctgtaatcccagttactcgggaggctgaggaaggagaatcacctgaagctgggaggtggaggttgtggtgagctaagatcgcgccattgcactccagcctgagcaacaagtgagaaactccatctcaccaaaaaaaaaaaaaaaaaattagccaggcatggtggtatgtgcctgtaatcccagctactcagtcgggaggctgaggtaggagaatcgcttgaacccaggaggcggaggttgcagtgagctgagatcgtgccactgcattccagcctgggcgacagagcaagactccatctcaaaaaaataaaaataagataagccataatcatagctaattgtggctagcttgtgtttccacaaacacaagtagtttaacaaacccctggactgttcatttcaatgtaatttaattcagcatattatgtactctacagtttatgcttaaagttttaatactatatatatttttaaacaagtactcactttttttttttttttgagaccgagtcttgctctgtcgcccaggccagagtgcaatggcatgacctcggctcactgcaacctccgcctcccaggttcaagcaattctgctgcctcagcctcccaagtagctgggattacaggcacgtgccaccacacccagctaatttttgtatttttagtagagacgaggtttcaccatgttgatcaggctggtctcctgacctcaggtgatccgcctgcctcagcctcccaaagtgctgagattataggcgtgagccaccatgcccggccaacgagtactaacttttaaaaattaaaaagagccagtattgtctgggcatggtgactcacgcctataatcctagcactttgggaggctgaggcatgcggatcacatgaggtcaggagttcgagaccagcctggccaacatggtgaaaccccatctctactaaaaatagaaaaattagtcaggtgtggtgacgggctcctgtaatcccagctactcaggaggctgaggcaggagaattgcttgaacccaggaggcgaaggttgcagtgagccgagatggtgccactgcactctggcctgagtgacagagggagactctgtctcaaaaaaataataataataaaaattaaaaaaataaaaagagctaatatttaaaaagaaggcaggaaggaaggaatgaagaaagaaaaccaagatattaccagctatgtagtattgttgttcttattctgaagcaggtgaattacactgagtggaagttctcagagactaacagcttcataggtgatggctttaaaaatcagcacgaggaagaggaaatgacattatcccattcagcactgaaacagaaggaacctctacatcctgtaaatggtattgtcttttaaaatctattttttttcctagcactttgggaggccgaggtgggcagatcacgagatcaggctttcaagagcagcctggccaacatgatgaaacccgtctctactaaaaatacaaaaattagccgggtatggtggcaggcgcctgtaatcccagctacgtgggcggcggaggcaggagaattgcttgaacccaggaggaggaggttgcagtgagccgagattgcaccactgcactcctccagcctgggcgacagagcgagactccatctcaaaaaaaagaaaaaaatatatattttttctgtttaatcatttaattgttttgccaagctagttatttacttttctccttcaccttagaatgctaaagttttcatggaaaattagtatgtaagacctgaggcccagttttgtgttacaagtgtgatggttgggttaaccaaggctggaattcttaaataagtaactttctcagtgtttataaaatgttattttgccccaggatttttttgttttgttttgttttgtttttgagatggagtctcattctgtctcccaggctggagtgcaatggcaggatctcagctcactgcaagctctgcctcctgggttcaagcaattctcctgcctcagcctcccgagtagctgggattacaggtatgtgccaccatccccggctaattttgtatttttagtagagacaggttttctccatgttggtcaggctggtctcaaacttctgaccttaggtgatccgcccacctcagcctcccaaagtgctgggattacaggcgtgagccactgcacccgacctagttttgattttctcattaaaactgtttgttggctggttgtggtggctcatacctgtaatcccagcactttgggaggcatgggcgggtagatcacctgaggtcgggagtttgagaccagcctgaccaacatgatgaaaccccatctactaaaaatacaaaaaattagctgggcatggtggcatctgcctgtagtcccagctactggggaggctgaggcaggagaattgcttaaacccaggaggcagaggttgcagtgagctgagattataccactgcactccagcctgggcaacagagcaagactccgtctcagtacaaaaaacaaaaaacaggacagtgtttgtcttgattattgagtttttggcaccccttcaaattttatgcctaaggtcagtgcctcacatgccttcctctacttctgacagtggtcagaatagtggttactgctaggagaaggggaagagggttatcaggaaaggacaccctttgggcatctggagtgctaccagtgttctatttcttggctgaacggtgatagagatgttcattttacaacaatttaataagttgaacatttatatttcatgggcttttctatgtgcttgaaaaatttaataatgagaggaaaaatataaaggtagatatggaaatattatgaaaagagagtctttactacttaaaaaagctttttttctaaatctctagaagcattttatatatatataattttttttttttttttttttgagatgaagtctctctctgtcacccaggctggagtgcagtggcacaatctcggctcactgcaatctctgcctcccaggttcaagcgattctcctgcctcagcctccagagtagctgggactacaggtgtgccccactatgcccggctaatatttgtatttttagtagagactggatttcatcatgttgtccaggctggtctcgaactcttgacctcaagtgatccacctgcctcagcctcccaaagtgctgggattacaggtgtgagccaccacgcttggcctaaaagtataatttttaagcttttgaatgtatttggcataacttcttaaatgggaagagcataaatgatttttctcatgagaaggataatttttctattgattatgtaatctgatttctccgtcaaagtttactcaatgtaaggaaggttaacaagaataaccaagcccaaaatttcccagagccaaatttacatgactggcaagaaatcctggttataagagaacaattccattcttatgatttgcagacaatggaatattatttagtcataaaatagtagaataaatagtaacagtgtatctagatagcttcagtgtatccagacctgaatgcggggttccagttatctccatactcccaatttacatttcttcaggtatttgattgagtataatctatatccactagctttttctccttgtagaatgtgaaatatgggaccagaaggtaatctaaacctcatgtactatatggtcatctatttatagtcataaataataaaagaagactatttctgtggaagcctaattgttagttattgttttaatatcgctgttctccatgaatttcaaaagatcaagactggccaggcgcagtggcttacacctgtactcccagcagtttgggaggcagaggcaggcagatcacctgtcaggagcttgagactagcctggccaacatggtaaaaccccgcctctactaaaaatgcaaaaattagccaggtgtggtggtgggtgctggtaaccccatctgagaagctgaggcaggagaatcgcttgaacctgggaggcagaagttgcagtgagctgagaccatgccattgcactccagcctgggcaacaagagcaatgcttcatttcaaaacaaaaacaaaacaaaaacctcaaaagcaccagttagtactcgcaagaagctaaaatctgcctggtttcagatgtctgagtggagctatcaagcaggatgctgtagttgttgaaaaagaagcttattaatcttttagacaaagatctaagggtattaggtaaaggccatcaagaaatgaaaagggcctgattttaaggccatttccacatatgtagacaaagccttgtgtcttttagcagcctttgcttttgctgcccgctcagaccttttccctttgagacctcagtgaaacagacaacccaagactttgaaattttacagaagaggcacagcttgccatccagttatctaatgctatgtaacaatctactccaaaacttaatgacttaaaacaattgtcatttctttggctcactactcggcatgttaggcaggtctcatgaagaaggctcatttctcctctctcaatgtggcattagatggggtagctcagctagggggctgatgggttcatcttgcaagatagctcaccctactagctgatcaggtggtcctggctgtcagtggttgcttgggcttcctcacaggttggtagctgagttccaagacagcaaggtacaagtccatggcatttttgtgttctggccttagaagtcacatagcatcactcctaccgtactctttcagttgagacagtccaaaagatccaccttaattgaaggggaggggacaaagaccccaccactcaataggagcagcgtcaaggtcagtcgcattgtaaggagagcagctgagataggagagaccatttgaggccacctttttttttttttttttttgagacagagtctcttgtcgcccaggctggagtgcagtggctcgatcttggctcactgaaacctctgcctcccggattcaagcaactctcctgcctcagcctcccgagtggctgggaccacaggagtgtgccaccaagccaggctaattttgcatttttagtagagacggggcttcaccatgttggccaggctggtctaaaactcctgacctcaggtgatccacctgcctcgaactccaaaagtgctgggattacaggtgtgagccaccacgcccagccagagaggccatctttggaaaatacaatctgccccacccaattgcacagctttacctcaagcttggccattttcttcagcccccacaaaaggacttcctttcttccttccttactctcacccttccttcctgtcttccttcctttcttcctttctgtttttccttctttccctttctttttttgagaagtgaatcctgtatgtttggcaagcttctgaataagtgtacctttgaaaaagagggtttgattcttagtaagtgaaggcaaaatctagacactcggaactagtgaccagacagtggattggagatgtgtgtgctgggtcttttcttgggctaaagtgctttgaaacagttctataactgcaacctcttctctagcagacaaagaatcctctgaacaaggttctgaagtcagtgaagcacaaactaccgacagtgatgatgtcatagtgccacccatgtctcagaaatatcctaaggcagtaagtacactggagtaatcattgcatacgagataagacgataaataatgacagtggccagtcatgggggctcacgcctgtaatcccagcaccttgggaggccgaggcaggcagatcacctaaggtcgggagttcgagaccagcctgaccaacatggagaaaccccatctctactaaaaatacaaaaaaaattagccaggcatggtggagcgtccttgtaatcccagctactcaggaggctgaggcaggagaattgcttgaacccgggaggcagaggttgcagtgagccaagatcacgccattgcactccggcctgggcaacaagagcaaaactctgtctcaaaaaaaaaaaaaaaaaaaaaaaaagcaataatgacagtgtgcttagtggccacacaagtgaagggcaatccagttttaatgaagctgatggaaaatgcaaattgtttagttaaatttatgtttcgtgtgaatgaaggtcggctggtacagtcagataaaaggatcattttcttgagatagtgtaaatgatgacttgcttcaatacttctgtcctatctggatcctttgcctcttactcccatatcctccattgtgtcctgtaattcatgcccagcctgaatggtacccctgcctttaagtccatctaaggaaaacgggtttgctttgggagatggagtctggaagagaggacaggattcttcatgggagggctcatggagatcattccatttctgctgttttttactcaacctgtaattatctattaaacagttcagcctcaaagctctttcagaactgatttaagagacacgcatcaaaaaaatataaaaaagaaaaaaaagccggttgcggtggctcacgcctgtaatcccagcgctttgggaggccgagacgggtggatcacgaggtcaggagatcgagaccatcctggctaacacggtgaaaccccgtctctactaaaaatacaaaaaaattagccgggcgtggtggctggcacctgtagtcccagctactcgggaggctgaggcaggagaatggcgtgaacccaggaggcagagcttgcactccagcctgggcgacagagcgagactacgtctcaaaaaaaagagacacacatatattaataaatatccacacatatattcagtaatcattgtgttctaaccttgtgggttacacatgaggtagaaaacaattactcttaagtcgctgctgcctgacacatttgtaggtcctcaatatttgttgagtgagtgactgaataatagattcagagtgaattgatgattatgaacttcattagaaacattaaataagaatgtaggatgacctaaaaccaaggaggtagattgtgtaatataaagtctgttgtaagaaatcagaaaagggaatttatggtttcttttgtagaggttggaaaactcttccttgaaagctggaacatgtgcttgagaactgcaggaaaatgaaggatattggagtgaggagaaaaaactcaaagtcagtagacttaaacactgaatataacacatagttcaatttcagctgaggtgtggtggctcacacttgtaatcccagcactttgggaaactgaggcaggcagattgcttgaggccaggaatcaagaccagcctgagcaacacagcaagacaactgtctctacataaaatttaaaaactagctaggcgtgttggctcacatctgaagtcctaagtatttgggaggctgaggtgagaggattgcttgagcctgagagtttgaggctgcagtgagccatgatcttgccactgcactctagcttaggtgacagagagagaccctgtctcaaaaacaacagcaacgacaaaaccagttaagtttctctttgtctgaacttttatctatcatatctttttttagatattatgtagttatctgacaagtgtttgtaagacagactggagccacagaatgttggaattagataacacttctatattaccaaggtaaagaagattaaatgatgtgtacaggattattgagttagtgaaagagctgaaactccagttgaggtttttaaactgcgcaacctctcaagtaaccaaaaaaagcagccagctgatcagcaaactcatcttgaactgtaacaagccagccagatttcattaaaaacattacctaaattaaaggctcctaagtaagatatccttttagaaaacttccttgtgtgccccaaagtgttacttgagaaattaaatatgagaaaggagcctatctaagcaaaaaattagtgttattatcaagttaaacgtacaacacaggcacatatatattaaattattgttatattccaaaatgtccaggcatgaaaggtagagggggttgaaagctcagagtcaaaacttgagttctgtcactcttctgcctggggtcagctgggataaatggaaatgcagtagagtgtaatgtttaagagcatggagatttggttgagacagtgatttagatcccagctctgctacttaactagatatacagctttgagagagttttttaacctctattaggccttgtctccttatctgtaaaatggtagtattaagtatacccatctgatactgatgtggcaagattaaaataagggtttaatacagtgcccgagacaaattaagccctaaatgatagtgaggatgagtgtgatgataatagtagtctcatttctctgacctactggagttctcaatgttaagctttttttttttttttttgagatagagtcttgttctgttgcccaggctggagtgcgtgcagtggcgcaatctcggcttactgcaacctctgcctcccaggttcaagagattctcctgccacaggctcccgagtagctgggaccacaggtgtgtgtcaccacgaccagctaatttttgtatttttagtagagacggagtttcactatgttggccaggctggtctcaaactcctgacctcaggtgatccacccacctcggcctcccaaagtgctggaatttacaggtatgagccactgcgcccggcctaggttaagcatttttttttttttttttttttttttagagtctcgctctgtcacccaggctggagtgcagtggcaccatcttggctaactgcaacctccgcctcccgggttcaagcgactctcctgcctcagcttcccaagtagctgggactacagacacacgctgtcacgtccagctaatttttttgttttgagacctagtcttgctctgtcacccaggctagagtgcagtggtgcgatatcggctcactgcaacctccgccccccaggttcaagcaattctcctgtctcaccctcccgagtagctgggactacaggcgcacgccaccatgcctggctaattttttgtatttttagtagagatggggtttcaccgtgttagccaggatggtctcaatctcctgacctcgtgatctgcccgcctcggcctcccaaagtgccgggattacaggcgtgagccaccgctcctggcctccctcttcttaacagttactaatgaggagggagcaatcattttcatttgctctatggtcccagattactgtttctttagcaatagtgaatatcgagaacctcaaaattttttctcttatcgtgtcaatttcaggtgtcaggaatttcctgacccttatgtatgccaggtagtaagttttggcagccctgccccccagccaaattaggtggcacatctgagctaataagccaaagggtgttatctggcactaatccttgcagggtttctgccagcaagttcaaatgagttgatatatatttcaatggttaatattactaattgcatactttctttgctgttcagccccaataaaattacataatggaattagctcatgtaaagaaagtattctgaatccaacaaaaaatattagattgaaccatatattgtcatactcatagataaaaaatggttgacaattgtcagttctgtatagtccaacctaatatgaatgaataaaacatctgtgtgtacttggatcaaattttaatcttattcatcctcccatttcaccattgttaccagaataaacttgatgtagtctgcatgaatatggacttctgattattgtcccaggattattagcaagtttaaaaaatttgctgggtgtggtggctcacgcctgtaatcccagcactttgggaggtcgaggcgggcggatcacctgaggtcaggagttcgagacaagcctggccaacatggtgaaaccctgtctacaaaaatacaaaaattagccgggcgtgatgacgggtgcctgtaatcccagctactcaggaggttgaggcaggagaatcgcttgagcccaggaggtggaggttgcagtgagccaagattgcaccactgcactccagcctgggcgacagagcaagactctatctcaaaaaattgttttgttttgtttttttaactaggcaggtgtggtggctcacgcctgtaattctagcactttgggaggccgaggtgggctgatcatgaggtcaggagatcgagtccatcctggccaacatggtgaaaccccgtctctactaaaaatacaaaaattagctgggcgtggtggcgcgtgcttgtaatcctggctactcgaaaggcggagaaaggagaatggtttgaaccaaggagtcggaggttgcagtgagccgagatggttcccctgcactccagcctggtgacagagcgaaactcggtctcaaaaagaaaaaaaagaaaaataattttagatgtacaggaaggtgctatgtaatgtttatttagttttactcttttttcttcttttttggtaatgttatgaaacatgtatttttcaatcaataatgttttggggttctatccatgtcgatatatttagctttttatagttccttcgtcttaactgctgatcgatattgcattaaaataatacatgacctttcgtttagacagaactctaatgggtaatgattgagatttcatactgtgtgccaagtgcttgatattcatgactctctcgggcttcacagcagccttatgagttattctttccttcaagtaattatgaagtgcctgttttagtaactgccgggctctgtgggcacaaaatggtggataagacagacttggtctcttctctcttgaatcttacatactactgagggaaaatatgtacatcagtgagcaaataagtaaagcagatagctctgagattctaagtactatgaaggaaataaatagggcgatataatagcaatgcgaggagttgaactaggataggtgttgaggaaagatttctctgaggaggggacgtttgaactgaaatctgaagaacgagaagggaagagctacccatgtactgggtagactgtactcatctcaggcaaaggaattggtaagtgtaaaggccctgaggtaggaaagagtttgatttacctgaggagtgggaaatcaaaagaaaattaaagtttctcttgcacacatgtatattattattcccccaccccctttcaaaggaggacagtgaagtctagggagaagagcttgctcaagggaatatttaatacagttttactgagtgtatactgtgtgccagacattatgccaggcattgtgccaggcactagatactcggtagagactttaatggggccgggcgcaatggctcacgcctgtagtcccaacactttgggaggccgaggtgggtggatcacttgaggccaggagttcgagaccagcctgggcaacatggtgaaaccccgtctctactgaaaatataaaaattagtcgggcatggtggcacatgcctgtagtcccagctactcaggaggctggggcaggagaatcgcttgaacctgggagtcagaggttgcagtgagccgacgtcgcaccgttgcactccagcctgggcaacagtgctagactccatctctaaataaataaatacagattcccaggagccactctagacagtctgatataacacagaggcttttatacattttttatagcaatcactatgagaaatacatttctgcagtatccaatactcttataaaagaacaagtttcaagaaaccaggcttactattaacatttgccatgcattctcctattccactagatagtgtcttatcctgtctatcctatcctattgtttcttttttaaaaagctagtgaaacccgctaatctgacccatcaaagtgtcaaaaaaaaaccagatttttcaaaacactgtatagtcaatagttttcttgatgtttgggagagttggatgttatgggagggttattaagagaaaaacatcaaatatcgtttttttgtttgtttgtttgttttttgagacccagtctcactctgttgcccaggctggagtgcagtggcactgcaacctccacctcctaggttcaagtgattctcatgtcagcctcccgagtagctgggattacaggcatgagccaccatgcctggctaatttttgtatttttaatagagatgcggtttcaccatgttggccaggctggttttgaactcctgacctcaggtcaactgcccgcctcggcctcccaaaatgctggtattacaggtgtgagcctctgcaccccgccaaatatcttcatttttaagaagcaccccagatgattctgatgcagaatcattgagagatcttgcctgctgaatttcttaggggcaggcacaggagctccacttgctttctaagagaagaaaagatggggtaagagccggtctttggagaagtaagggcattggcctggccagctagtgaaaagaagcatacaggagggcactcacagatagaggggagagcgctatggctggtagggaaccatcctggattgactcattactggtgtcacgatactgacttgcctgccacactgtggaaggaggagacttctgttggccttggtgtacttctggaaacttcctcctggtatccctgatgccaacatggacacagggacaattaaaagaaaggacagggtgatggcagcgactgtgaagtgggattgaaaatattggagttcctggccaggcgcggcggctcacgactgtaatcccagcactttgggaggccgaggcgggtggatcacgaggtcaggagatcgagaccatcctggctaactaaaccccgtctctactaaaaatacaaaaaattagccgggtgtggtggcgggtgcctgtagtcccagctactcgggaggctgaggcaggagaatggcgggaacccgggaagaagagcttgctgtgagccgagatcgtgccactgcactccagcctgggcgacagagggagacactgtctcaaaaaaaaaaaaaaagactggagttcctgtgggagggcagggtggtctggtggcctcctcagtggcatgcacttgagtgggcatgggaagccctgggcagctctttgctatagtggctgaagcagctactgaatctccagtatcagtcaggaggtcttttaggtcctaacctcaggaaaatactagcttggttttcatgaagaacactgtggccagttgcagtggttcatgcctctcatctcagccactttgggaggctgaggtggacagattgcttgagtccaggagttctagaccatcgtgggcaacatagcaagaccatatctctattaaaaaaataaaaataattgtccctatgtggtggtgtacctgtggtcctagctacttgggtgactaaggtgggaagactgcttgagatcaggatgtcaaagctgcagtgaaccatgatcacacaactgccctccagcctgggcaacaaagcaagactctgtctcaaaaaaaaaaaaaaaagttgagaaatagctgtttagaaatttatttatttgtatataatcatcgggtacaagcacagttttgctgcatttatatattccactgtggtgaagcctggagcgacgcacattgttcccaccaagcaacctcccatcatccaccctccccgccgctccgaatcagacatttttttttattctttctatatgtggagatgactgagaaaggctgtcctggagaaatgatccactggactgtgagagagaagagctgggttctctttataaatttcctatcaattaactatggcaattaagtcaagttgtcttttgatgccagttttacctataaaaggattctcagggaataatatagtagatagattatacctatggttgatttctagagagtaccgtaatgggttaattggatggcgtataagcacttggagcctcactaacctttaggaactaaataaacattttccttatcaggattcagagaagatgtgcattgaaattgtctccctggccttctacccagaggcagaagtgatgtctgatgagaacataaaacaggtgtatgtggagtacaaattctacgacctacccttgtcggagacagagactccagtgtccctaaggaagcctagggcaggagaagaaatccactttcactttagcaagggtgaggcatcctgtgtggttactggggtgaggaagtctgatgaacattgagactgagggtcagaattactctggatttttgtggggtgaatccagccatttcactttattattttattgttcaaagtgttgtgtgcatgtggtttaaaaacatcgaatggggctaaacattttacatgaagcaggcctttgtcccagctcttcacagatcacttcgcctgttcccacccttcctcaatccacggcttcccacatttcagctatatttatttttactttttgaggtggagtctcgctctgttgcccaggctagaatgcagtggtgtgatcttggctcactgccacctctgactccgagattcaagcgattcacgtgactcagcctcccaagtagctgggattgcaggtgtgcgccaccgtgcctggctagttttttgtgtttttagtagaggcggggtttcaccattttggccaggctggtctcaaactcctgacctcaagtgatctgcctgccttggcctcccaaagtgctgggattataggcgtgagccaccaagcccatcctatctcagccatttcttctgttatttacttccatcatatttctgagtattgatttttgttcttcctcttttcctgtttttttttttttttttttttttttttttttttttttttttgagatggagtctgaacatgttgctcaggctggtttcaaactcctggactcaaatgattctcctgcctcagcctcctgagtagctggaattacaggcgtgagccaccatacctggcttctgagtaacatttctattgcaatctcctgattcaccggctttagacttcctatctcggaccttaaaagttagctcttttgcactacactcatgtccctttccttcccatcgtaattgtatcataatttttatttaaatccatttaaattggttctgttattatggatatgtaaatattaattcttgcagaaccaagtagtatgcaatgattatatttctttacacgtattttttgcagcaatttttcattcgccttattttcattatacatattgtaattattttcgtgtccttcaacagtcttcccaaattttgaaataatcaaacctgtcaaattatctactcatctatttttttcctgaagacctctctccatcctcttgttctgctctagcccactgtttcattattactgctgctcatggagaatacgatcaaattctctcctataccagatttcttatctcctggttatcctctaatttattttcttattttaatggatcatattttcagtagtttttaaagaaagggcatatcacaagtgaaaatttgagaaagtcgtgcatgaaatctttttttcctaccctcatatttgattcaagtgtggaaatctttttcattcagaatttcgaaggagcctgggtgcagtggctcatgcctgtaatcccagcactttgggaagccaaggcgggcagattacttgaggtcagaagttggagaccagcctggccaacgtggcaaaaccctgtctctactaaaaatacaaaaattagccgggcatggtggggtgcacctgtaatcccaactactcgggaggctgaggcaggagaatcgcttgaacttgggagatggagactgcggtgaaccaagatcacgccactgcactctagcctgacacagtaagaatctgtcacacacacacacacacaaatgattttcaaagcagttggtccatgttattctagatccaggcaaggagtctaatctttttatgaaaactaccatgaataccactaatgaaagtcttggggctcacactgcaacagtatatgattctttgcttttttctcttacccttaatacagtaatagacctggacccacaggagcagcaaggccgaaggcggtttctgttcgacatgctgaatggacaagatcctgatcaaggacagtaagcatctgctttccactttgaaacaaaggagatattgagacagaaattcaaaagtttgagtttggttttgtgctgatgctgaatattttaataacttttttgagttaatttactcttaatgaatttcctatgtacttgagtataatttatatttgtgactacctaatccattacctaatcttataggttatttatttatttatttatttatttattttcgagacagggtctcactctgtcgtccaggctagagtgcagtggtgcgatcttggctcactgcaacctccacctccccaggctcaagggattcttgtgcctctgcctcccaagtagctagggttataggcatgtgccaccatgcctggctaattttttgtgtttgtagtagagatagggttttgccgtgttgctcatgtctggtcttgaactcctgcgctcaagcgatctgccctcctcggcctcccagagtgctgggattacaggcgtgagccaccgtgtccagcccatagtcttataggtttagttcatttctcacccatgccagcctgatgggccctttttttgtagcagcagtttacttgaatattgacaatgcccaaatggaataacaaaaagtgttgacattcttcttttttttgagacagtgtctcactctgttgtccaggctggagtgcagtggtacaatcttggctcactgcaacctccacctcctgggttcaagcgattcttctgcctgagcctcccaagtagctgggatgacaggtgcacgccacttgcctggctaatttttgtatttttagtagagacagggttttgccatgttggccaggctgatcccaaccccaggtgatccttctgcctcagactcccaaagtgttgggattacaggcgtgagtgaccacacctggtcaacaggaattttttgatgttgacataactaagtgaattttagatctcctttaaagttttaggaaagctggttgtccttattattccaataatctgaagaaggcctcctttcagagtttccagataaaatgtgggacatacccaaaaaaaaattatttggtcgggtgcagtggctcacatctgtaatcccagcactttgggaggctgaggcgggcagatcacttgaggccaggagtttgagaccagcctggccgacatggtgaaaccccatctctactaaaaacacaaaaaaatcagctaggcatggtggcacatgctggtaattctagctactcaggaggctgaggcatgagaatcatttgaatttgggaggcggaggttgcagtgagctaagattgtgccactgcactccaacctgggtgacaaagcagactctgcctctaaggaaaaaaaaaagttatttgttgtttagctgaaattcaaatttaaataggcatatggtttttgtttttgaaatctgttatccataccgcctgtgcatgtgtgtgcataagaaataatatggggctggtgttttatcttatttttaatttttttgtttgtttgttttagagacaggatctcactatgttgcccagctggtctttcagctcctgggctgaagcagtcctcctgccctgcctcccaaagtgctgggattataggcatgagccactgtgcccgacctggtgttttaattactttttgaaaggcccaatacttttgtttcatctgcttttactttgtctttggttagtcatagaaagaactgaaaaaggagccagatgaaataaacagtgactctgacttcagcatcactgtgggcttaaacagatgtaagcttacagagaacttttggacatggaaagtgatttggttctttcctttctgtgctaatgtcaaatttagctttcacttttttttccccagcatttccagaactctctcttcctttattcccttacagtgataatcattttctactcaattttagattcgattggtattacctttggctttctttttgccagtatggtctagcagacagagcaggctttgtaatcagaccaaccttgtttttattccagactctttgacttactagctctttgatctttttgatattacttaatttgaaggctcttgtgagaataaaattgagctaatatagtttacataaagcacttggtattgtgcccggcacattgtaatgctagttatcatccctttcctatgcaaattgggatgagggagtcagcattatcacttcgcattgttgaagttctcaataatgacatagaaacatagttacaaatgaatattgcctaatgggctgagaatggatccctttaaagtaattcctttgtttcagtttaatcatatttagctgtgcttttaaaagcttgaatttttagtcctattcctggcactctgtattagctaccaatatttgcttttaaaaattaataaaaatatgaaaaatcaagaataggcaaatccagagagatagaaagtagattagtggttcaggagctagggaaggagaatggggagtgactgcttaatcagtacagggtttctttttcttttttcttttagagactgggtctcgttctgtcacccaggttgaagtgcagtggcatgaacacagcccactgcatcctcgacctcctgggctcaagtgatctcacctcagccttccaagtagctgggactataggtgtgtgccaccatgcccggctaattttttattttttttgtagagacggggtgttcctatgttacccaggctggtcttgaactcatgggcacatcccatgatgttccctcttctaaaaggactgttactgcttaaattataccaattcctgacttttttgcttattgtcattttgtaaaatggaggcaagggaaaagtgattcagagaagacgttgtattgtttatgattacttttatccttattttatttttgaagcattaagagtatcaacagtgctgaattaaatgcaatttctttttagtttaaagtttacagtggtaagtgatcctctggatgaagaaaagaaagaatgtgaagaagtgggatatgcatatcttcaactgtggcagatcctggagtcaggaagagatattctagagcaagagctagacagtgagtcatttttttttcagttctaattatttccaaggaaatcatcctaatagtgaatatattttatcttcaatacataattattactatgaagttgataagacacaaagtggattgaaatcttatccctacaactgtatttatttctggatccaacattaaagtagtcagttgtgtatttttacccccatatacctgattacaactagaattgattttgaatctacaatgtttgaaaaggagatttttaaaaagacaagttattttcatttcaaatttatacatcagaattttggacctctcttgagcattttcgtataggcagctgatgcccattctttatgttatcatgcatccagtcttttttttttttttttttttgagatggagcctcactctgtcgcccaggctggagtgcagtggtgtgatctcagctcactgcaacctctgcctcccaggttccagctgttctcctgcctcagcttcctgcctcagcttccatggtgtgccaccatgcctggctaatttttgtatttttagtagagaccgtgttttaccatgttggccagactggtctcgaactcctgacctcaagtgatctgcttgccttggcctcccaaagtgctgggattgcaggtgtgagccactgcacctggcccatcttgtctcttaaaaagacattaactgtctcctctttcctcacattcactggtcattaagtcttatccattctacttgtgaattgactatgctctccttactacaattttttttttttttttttttgagacagagtctctctctgttgcccaggctggagtgcagtggtgtgatctcggctcactgcaacctccacctcccaggttaaagcgattctcctgcctcaacctcctgggtagctgggactacaggcacctgccaccacgccagctaatttttgtatttttagtagagacgggctttcaccatgttgcccaggctggtctcgaactcttggactcaagcaatccaccctcttttgcctcccaaagtgttggcattacaggcataaaccactgcgcccggcctccttaaatataattactataatttctttcttttttttttttttttttgagatggagtcttgctcttgttgcccaggctggagtgcaatggaccgatctcagctcaccacaacctctgcctctttcttaatcaagcgattttcctgcctcagcctccctagtagctgggattacaggcatgaaccaccacgcccagctaattttgtatatttagtagagatggggtttcttcatgttggtcaggctggtctcgaactcccaacctcatgtgattcgccctccactcagcctcccaaagtgctgggattacaggcgtgagccaccgcgcccagccatataatttctaaactggtcttcctgccaccggtttcttctaccccatttccatctactatagtaaatacataatacatttgatcactgccttcttcttaaatccttttacagtttgctatagatcagcatgttttaaaaacatttgtatttgagtacctttagttgggactgcgctgtccagtcttcactgttcccattaccttacatagctgggatgtcacctatcttatctgctaggaccttcagacacttaagattatccactagatcaatgtttttcaaacttccagacacacaccccattagtggatgtgaaactgaattagtaaatcacaaggaaatttgaaaaatgcaaaccaaaactgtgggaaagaaaacaggaattaaaggccaggcgaggtggctcatgcctgtaatcccagcactttgggatgccgagatgggcggatcacctgaggtcaggagttcgagaccagcctggccaatatggtgaaaccccatctctactaaaaatacaaaaaaaattagccaggcatggcggcggacacctgtaatcccagctactcggaaggatgaggcagaattgcttgaacccgggaggcggaggttgcagtgagctgagatcaagtcaccgcactccagcctgggtgacagaacaagactctgtctccaaaaaaaaaaaaaaaaaaaagaaaacaggaattaagagtacatagcacatattgtcttgtgaaacttgttttatgtattgtttaatgaatcatggtataaaattattcttactgatcattataaacattttttgaggaatactcctcagaccctaaggtttacaaagttcaaatgttagataagattctaattatattcctctagtatctttccaactgtgatccttagtctttttcctcatctataaaacgggaataacagcagtctctatcttactgagttgtgaagattaaggaagcacttaaataagggattaaggggcttagggtagtgcctggcataaggcaagtgacgttatctttgtgggctattttccaactcactcctatccccattcctaaacatgctatgttcttcctgacctccatgccatttgtatgtgcacagggaaaatccacttaagacttttctggtgatttctccagaaatcctttccaatttgtccattctggtgcagatgcctcgttatgtccccaaagcaacttgtgcttccatttattatatagcacctatacactataccattttcctttctccttcactagattgagtcctcttatgaaatgggtaatttcattcatttagcatccccagtacctaacctgacaaataccaagtatcaaagtgttcaactgagtgatgctgtttttttccctttcccaacagttgttagccctgaagatctggctaccccaataggaaggctgaaggtttcccttcaagcagctgctgtcctccatgctatttacaaggagatgactgaagatttgttttcatgaaggaacaagtgctattccaatctaaaagtctctgagggaaccatagtaaaaagtctcttataaagttagcttgctataacatgaa

SEQ ID NO: 13835 - DNA, 2371 bp, Homo sapiens
atgcttattctgcagcgcaaaatcaacgtgtgttatcaggaactggaggcaatgatgacaaaagctgacaatgataatagagatcacaaagaaaagctggagaggttgactcgactactagacctcaagaataaccgtatcaagcagctggaaggtattttaagaagccatgaccttccaacatctgaacagctcaaagatgttgcttatggcacccgaccgttgtcgttatgtttggaaacactgccagcccatggagatgaggataaagtggatatttctctgctgcatcagggtgagaatctttttgaactgcacatccaccaggccttcctgacatctgccgccctagctcaggctggagatacccaacctaccactttctgcacctattccttctatgactttgaaacccactgtaccccattatctgtggggccacagcccctctatgacttcacctcccagtatgtgatggagacagattcgcttttcttacactaccttcaagaggcttcagcccggcttgacatacaccaggccatggccagtgaacacagcactcttgctgcaggatggatttgctttgacagggtgctagagactgtggagaaagtccatggcttggccacactgattggagctggtggagaagagttcggggttctagagtactggatgaggctgcgtttccccataaaacccagcctacaggcgtgcaataaacgaaagaaagcccaggtctacctgtcaaccgatgtgcttggaggccggaaggcccaggaagaggagttcagatcggagtcttgggaacctcagaacgagctgtggattgaaatcaccaagtgctgtggcctccggagtcgatggctgggaactcaacccagtccatatgctgtgtaccgcttcttcaccttttctgaccatgacactgccatcattccagccagtaacaacccctactttagagaccaggctcgattcccagtgcttgtgacctctgacctggaccattatctgagacgggaggccttgtctatacatgtttttgatgatgaagacttagagcctggctcgtatcttggccgagcccgagtgcctttactgcctcttgcaaaaaatgaatctatcaaaggtgattttaacctcactgaccctgcagagaaacccaacggatctattcaagtgcaactggattggaagtttccctacataccccctgagagcttcctgaaaccagaagctcagactaaggggaaggataccaaggacagttcaaagatctcatctgaagaggaaaaggcttcatttccttcccaggatcagatggcatctcctgaggttcccattgaagctggccagtatcgatctaagagaaaacctcctcatgggggagaaagaaaggagaaggagcaccaggttgtgagctactcaagaagaaaacatggcaaaagaataggtgttcaaggaaagaatagaatggagtatcttagccttaacatcttaaatggaaatacaccagagcaggtgaattacactgagtggaagttctcagagactaacagcttcataggtgatggctttaaaaatcagcacgaggaagaggaaatgacattatcccattcagcactgaaacagaaggaacctctacatcctgtaaatgacaaagaatcctctgaacaaggttctgaagtcagtgaagcacaaactaccgacagtgatgatgtcatagtgccacccatgtctcagaaatatcctaaggcagattcagagaagatgtgcattgaaattgtctccctggccttctacccagaggcagaagtgatgtctgatgagaacataaaacaggtgtatgtggagtacaaattctacgacctacccttgtcggagacagagactccagtgtccctaaggaagcctagggcaggagaagaaatccactttcactttagcaaggtaatagacctggacccacaggagcagcaaggccgaaggcggtttctgttcgacatgctgaatggacaagatcctgatcaaggacatttaaagtttacagtggtaagtgatcctctggatgaagaaaagaaagaatgtgaagaagtgggatatgcatatcttcaactgtggcagatcctggagtcaggaagagatattctagagcaagagctagacattgttagccctgaagatctggctaccccaataggaaggctgaaggtttcccttcaagcagctgctgtcctccatgctatttacaaggagatgactgaagatttgttttcatgaaggaacaagtgctattccaatctaaaagtctctgagggaaccatagtaaaaagtctcttataaagttagcttgctataacatgaa

SEQ ID NO: 13836 - DNA, 2955 bp, Homo sapiens
tgtcctctgggatctcttacagcttgggaacagagatcatgtcacatctggtggaccctacatcaggagacttgccagttagagacatagatgctatacctctggtgctaccagcctcaaaaggtaagaatatgaaaactcaaccacccttgagcaggatgaaccgggaggaattggaggacagtttctttcgacttcgcgaagatcacatgttggtgaaggagctttcttggaagcaacaggatgagatcaaaaggctgaggaccaccttgctgcggttgaccgctgctggccgggacctgcgggtcgcggaggaggcggcgccgctctcggagaccgcaaggcgcgggcagaaggcgggatggcggcagcgcctctccatgcaccagcgcccccagatgcaccgactgcaagggcatttccactgcgtcggccctgccagcccccgccgcgcccagcctcgcgtccaagtgggacacagacagctccacacagccggtgcaccggtgccggagaaacccaagagggggccaagggacaggctgagctacacagcccctccatcgtttaaggagcatgcgacaaatgaaaacagaggtgaagtagccagtaaacccagtgaacttgcccacatcatggccagcaataccatgcaagtggaagagccacccaagtctcctgagaaaatgtggcctaaagatgaaaattttgaacagagaagctcattggagtgtgctcagaaggctgcagagcttcgagcttccattaaagagaaggtagagctgattcgacttaagaagctcttacatgaaagaaatgcttcattggttatgacaaaagcacaattaacagaagttcaagaggcatacgaaaccttgctccagaagaatcagggaatcctgagtgcagcccatgaggccctcctcaagcaagtgaatgagctcagggcagagctgaaggaagaaagcaagaaggctgtgagcttgaagagccaactggaagatgtgtctatcttgcagatgactctgaaggagtttcaggagagagttgaagatttggaaaaagaacgaaaattgctgaatgacaattatgacaaactcttagaaagcatgctggacagcagtgacagctccagtcagccccactggagcaacgagctcatagcggaacagctacagcagcaagtctctcagctgcaggatcagctggatgctgagctggaggacaagagaaaagttttacttgagctgtccagggagaaagcccaaaatgaggatctgaagcttgaagtcaccaacatacttcagaagcataaacaggaagtagagctcctccaaaatgcagccacaatttcccaacctcctgacaggcaatctgaaccagccactcacccagctgtattgcaagagaacactcagatcgagccaagtgaacccaaaaaccaagaagaaaagaaactgtcccaggtgctaaatgagttgcaagtatcacacgcagagaccacattggaactagaaaagaccagggacatgcttattctgcagcgcaaaatcaacgtgtgttatcaggaggaactggaggcaatgatgacaaaagctgacaatgataatagagatcacaaagaaaagctggagaggttgactcgactactagacctcaagaataaccgtatcaagcagctggaaggtattttaagaagccatgaccttccaacatctggtgattttaacctcactgaccctgcagagaaacccaacggatctattcaagtgcaactggattggaagtttccctacataccccctgagagcttcctgaaaccagaagctcagactaaggggaaggataccaaggacagttcaaagatctcatctgaagaggaaaaggcttcatttccttcccaggatcagatggcatctcctgaggttcccattgaagctggccagtatcgatctaagagaaaacctcctcatgggggagaaagaaaggagaaggagcaccaggttgtgagctactcaagaagaaaacatggcaaaagaataggtgttcaaggaaagaatagaatggagtatcttagccttaacatcttaaatggaaatacaccagagcaggtgaattacactgagtggaagttctcagagactaacagcttcataggtgatggctttaaaaatcagcacgaggaagaggaaatgacattatcccattcagcactgaaacagaaggaacctctacatcctgtaaatgacaaagaatcctctgaacaaggttctgaagtcagtgaagcacaaactaccgacagtgatgatgtcatagtgccacccatgtctcagaaatatcctaaggcagattcagagaagatgtgcattgaaattgtctccctggccttctacccagaggcagaagtgatgtctgatgagaacataaaacaggtgtatgtggagtacaaattctacgacctacccttgtcggagacagagactccagtgtccctaaggaagcctagggcaggagaagaaatccactttcactttagcaaggtaatagacctggacccacaggagcagcaaggccgaaggcggtttctgttcgacatgctgaatggacaagatcctgatcaaggacatttaaagtttacagtggtaagtgatcctctggatgaagaaaagaaagaatgtgaagaagtgggatatgcatatcttcaactgtggcagatcctggagtcaggaagagatattctagagcaagagctagacattgttagccctgaagatctggctaccccaataggaaggctgaaggtttcccttcaagcagctgctgtcctccatgctatttacaaggagatgactgaagatttgttttcatgaaggaacaagtgctattccaatctaaaagtctctgagggaaccatagtaaaaagtctcttataaagttagcttgctataacatgaa

SEQ ID NO: 13837 - DNA, 3738 bp, Homo sapiens
agttatgaataaagcaagggcagaaaaaaacatgtaggggagagaatgaggaactaggtccaggagatgctgaaactggataataaagacgtcatatcacaccccttggggtatccatctgagagcttgctttccattgccagcatgctggacagcagtgacagctccagtcagccccactggagcaacgagctcatagcggaacagctacagcagcaagtctctcagctgcaggatcagctggatgctgagctggaggacaagagaaaagttttacttgagctgtccagggagaaaggtaggctggaccttgaagagctctctcaaatgtggcatcctctacctctggtttgggagaagataacttgagccatcatttctttaatcccctcacttgatcctattcttttgtgggttgtaggtaactagaatgagaacactagcaatagatcagatctacaatcaggaaaacatgacacttacctacctctcatgtatactttttcctatataatgtctttccatttgagaagatgctagtttttgtttgtttgtttgtttgtttgtttttgaggtggagtttcgctcttgttgctcaggctcgagtgcaatggcacgatttcagctcactgcaaccttcacctcccaggtacaagcgattctcctatctcagcctcccaagtagctcggattacaagcatgcactaccacgcctggctatttttttttttttgtatttagtagagatggggttttaccatgttagttaggctggtcgtgaactcctgacctcagatgatccaccagcctcagcttcccaaagtgctgggattacaggcgtgcgccactgtgcccgacctgccagtttttaatttattatgttttttaaacgttcagtttattgaaagttttcttttgtttggtttggtttggttttgtttctgagagagtctcactctgtcacccaggctggagtacagtgatgcgatctgggctcacttcaacctctgcctcccaggttcaagagattctcctgcctcagcctcccgagttgctgggattgcaggtgcccaccaccacacccaactaattttttgtatattttagtagagacgagggttcactatgttggccaggctggtctgaaactaacctcaagtgatccacccgcctcagcctcccaaagtgctgggattacaggtgaaagccactacacctggctgaaagtattgaaagtgaatttctttgtcttttatccttctcatcattttagaggtaactggaatacttttttttttttttgccatccaattcttgaaattgagtagcaaattactattcttggttaccactgccagttcacccccgtcttaactcttggatctcaggagataggtatttggaacatttttaaatactgtcaaaaagaccttcatcttactactttttcctagcctggaccttaatatttagttttatcaaatttatatctcatcaagttttagtgtattcaaatagggaacggaaggaaaagaaatgtgtgaaatcaagaaaaatagaggcaagaaccatgtttaggagcacatgccaattagtatgtttgaagcacaaatgaagtcttgtaaggaccttcagggcaatctaatttaatcccttctctaatgcatgatggaaatgatctgctcactaaacaccgattacctttattccctgaaaaacacacacacagcctggtgtggtggctcatgcctgtaatcccagcacattgggaggccgaggccagcagatcacatgaggccaggagtttcagaccagcctggccaacatggtgaaaccccatctttactaaaaacacgaaaattagccagtcgtagtgtcgtgcgcctgtaataccagctactcaggaggctgaggcacaagaatcgttgaaccctggaggcataggttgcagggagccaagatcgcaccactgcactccatcctgagtgatggagtaagactgtctaaagagaaaaacacacacacacacattggaacacagaaatgcccatcctccatccaggccagggtgggtgtgaagatgggtgccacagagagctagtaacctagaagtcagaatggagtgggggtggagttggtgagatactggtttcgatgctgctgtcaaaaagtttggattaccctagtcaagtgattccctttctgttttgtgttgttattgttattccactttccactctaccattctgcaggtgtcttttgttttcggagtgcaagtagtatcacctcagtttactgagtcaataagctagagtcctcctctgtagaaataatagagaattgcttctcaaatttataacattaattaaaccttagtgggaagattaaattcacacttgatccaactctgaccatggtgataaataactacagaatttcacatttctggattatttttccccagcccaaaatgaggatctgaagcttgaagtcaccaacatacttcagaagcataaacaggaagtagagctcctccaaaatgcagccacaatttcccaacctcctgacaggcaatctgaaccagccactcacccagctgtattgcaagagaacactcagatcgaggtaagagcctctttaaacaaactagtccactctgcagagagatctctggcaaatatctctagggaagatgatgagattagaaaactaactaaataatattttgtcctgactgaggacactctttttttttttgagacagagtctcgctgtcgcccaggctggagtgcagtggcgcgatctcggctcactgcaggctccgccccctggggttcacgccgttctcctgcctcagccttccgagtagctgggactacaggcacccgccacctcgcccggttaatttttttgtatttttagtagagacggggtttcaccgtgttagccaggatggtctcgatctcctgacctcgtgatccgcccacctcggcctcccaaagtgctgggattacaggcgtaagccaccgcgcccggcccactctttttttttttttttttttttgagatggagttttgctcttgtttcccaggctggagtgcaatggcgcgatctcggctcactacagtctttgcctcccaggtttaagcaattctccttcctcagcctcccgagtagctgggattacaggtgcttgccaccacagccggctaattttttgtatttttagtagagacagggtttcgccattttggccaggctggtctcgaactcctgacctctggtgatccgcccaactcagcctcccaaagtgctgggattacaggcacgtgccactgtgccctgcttgaggacactttttggaaaactgtgagaaggcagagcgtagagaacttcatgagctccacccatttcttccactctttgcagctcataaaatttagaatctttttcagatgaggacttgaaaagatctgtggaagagcaaacagccattagtggctgtatcatctcccttcactgctgctactgaacatgagaactaggggaaagagcacttgtgaagtcatacaggtccttgtttacattttggagtagtttctgctgctggcattttactactaccaacaactgttttatggagaatcattattactttacctgtcatatttatactcccttttaccaatgcgtttccctctacagccaagtgaacccaaaaaccaagaagaaaagaa

SEQ ID NO: 13838 - DNA, 566 bp, Homo sapiens
agttatgaataaagcaagggcagaaaaaaacatgtaggggagagaatgaggaactaggtccaggagatgctgaaactggataataaagacgtcatatcacaccccttggggtatccatctgagagcttgctttccattgccagcatgctggacagcagtgacagctccagtcagccccactggagcaacgagctcatagcggaacagctacagcagcaagtctctcagctgcaggatcagctggatgctgagctggaggacaagagaaaagttttacttgagctgtccagggagaaaggtggagtttcgctcttgttgctcaggctcgagtgcaatggcacgatttcagctcactgcaaccttcacctcccagcccaaaatgaggatctgaagcttgaagtcaccaacatacttcagaagcataaacaggaagtagagctcctccaaaatgcagccacaatttcccaacctcctgacaggcaatctgaaccagccactcacccagctgtattgcaagagaacactcagatcgagccaagtgaacccaaaaaccaagaagaaaagaa

SEQ ID NO: 13839 - DNA, 14567 bp, Homo sapiens
ttaacatcttaaatggaaatacaccagaggtaagaccttaaaaactctgaagcactaaattgtgggttgtagtgtccccagatgtattattctcagaggtagaagcagaagcagaagcagacacacaagataagcactaatcggccgggcatggtggcttcggcctgtaatcccagcactttgggcagttgaggtgggcagatcacctcaggtcagcctggccaacacggtgaactcctatctctgctaaaaatacaaaatgaggcctggtgcagtggctcacgcctgtaatcccaacactttgggaggccgaggtgggtggatcacctgaggtcaggagttcgagaccagcttgaccaacatggtgaaaccctgtctctactaaaaatacaaaaattagccaggcatggtggtgtgtgcctgtaatcccagttactcgggaggctgaggaaggagaatcacctgaagctgggaggtggaggttgtggtgagctaagatcgcgccattgcactccagcctgagcaacaagtgagaaactccatctcaccaaaaaaaaaaaaaaaaaattagccaggcatggtggtatgtgcctgtaatcccagctactcagtcgggaggctgaggtaggagaatcgcttgaacccaggaggcggaggttgcagtgagctgagatcgtgccactgcattccagcctgggcgacagagcaagactccatctcaaaaaaataaaaataagataagccataatcatagctaattgtggctagcttgtgtttccacaaacacaagtagtttaacaaacccctggactgttcatttcaatgtaatttaattcagcatattatgtactctacagtttatgcttaaagttttaatactatatatatttttaaacaagtactcactttttttttttttttgagaccgagtcttgctctgtcgcccaggccagagtgcaatggcatgacctcggctcactgcaacctccgcctcccaggttcaagcaattctgctgcctcagcctcccaagtagctgggattacaggcacgtgccaccacacccagctaatttttgtatttttagtagagacgaggtttcaccatgttgatcaggctggtctcctgacctcaggtgatccgcctgcctcagcctcccaaagtgctgagattataggcgtgagccaccatgcccggccaacgagtactaacttttaaaaattaaaaagagccagtattgtctgggcatggtgactcacgcctataatcctagcactttgggaggctgaggcatgcggatcacatgaggtcaggagttcgagaccagcctggccaacatggtgaaaccccatctctactaaaaatagaaaaattagtcaggtgtggtgacgggctcctgtaatcccagctactcaggaggctgaggcaggagaattgcttgaacccaggaggcgaaggttgcagtgagccgagatggtgccactgcactctggcctgagtgacagagggagactctgtctcaaaaaaataataataataaaaattaaaaaaataaaaagagctaatatttaaaaagaaggcaggaaggaaggaatgaagaaagaaaaccaagatattaccagctatgtagtattgttgttcttattctgaagcaggtgaattacactgagtggaagttctcagagactaacagcttcataggtgatggctttaaaaatcagcacgaggaagaggaaatgacattatcccattcagcactgaaacagaaggaacctctacatcctgtaaatggtattgtcttttaaaatctattttttttcctagcactttgggaggccgaggtgggcagatcacgagatcaggctttcaagagcagcctggccaacatgatgaaacccgtctctactaaaaatacaaaaattagccgggtatggtggcaggcgcctgtaatcccagctacgtgggcggcggaggcaggagaattgcttgaacccaggaggaggaggttgcagtgagccgagattgcaccactgcactcctccagcctgggcgacagagcgagactccatctcaaaaaaaagaaaaaaatatatattttttctgtttaatcatttaattgttttgccaagctagttatttacttttctccttcaccttagaatgctaaagttttcatggaaaattagtatgtaagacctgaggcccagttttgtgttacaagtgtgatggttgggttaaccaaggctggaattcttaaataagtaactttctcagtgtttataaaatgttattttgccccaggatttttttgttttgttttgttttgtttttgagatggagtctcattctgtctcccaggctggagtgcaatggcaggatctcagctcactgcaagctctgcctcctgggttcaagcaattctcctgcctcagcctcccgagtagctgggattacaggtatgtgccaccatccccggctaattttgtatttttagtagagacaggttttctccatgttggtcaggctggtctcaaacttctgaccttaggtgatccgcccacctcagcctcccaaagtgctgggattacaggcgtgagccactgcacccgacctagttttgattttctcattaaaactgtttgttggctggttgtggtggctcatacctgtaatcccagcactttgggaggcatgggcgggtagatcacctgaggtcgggagtttgagaccagcctgaccaacatgatgaaaccccatctactaaaaatacaaaaaattagctgggcatggtggcatctgcctgtagtcccagctactggggaggctgaggcaggagaattgcttaaacccaggaggcagaggttgcagtgagctgagattataccactgcactccagcctgggcaacagagcaagactccgtctcagtacaaaaaacaaaaaacaggacagtgtttgtcttgattattgagtttttggcaccccttcaaattttatgcctaaggtcagtgcctcacatgccttcctctacttctgacagtggtcagaatagtggttactgctaggagaaggggaagagggttatcaggaaaggacaccctttgggcatctggagtgctaccagtgttctatttcttggctgaacggtgatagagatgttcattttacaacaatttaataagttgaacatttatatttcatgggcttttctatgtgcttgaaaaatttaataatgagaggaaaaatataaaggtagatatggaaatattatgaaaagagagtctttactacttaaaaaagctttttttctaaatctctagaagcattttatatatatataattttttttttttttttttttgagatgaagtctctctctgtcacccaggctggagtgcagtggcacaatctcggctcactgcaatctctgcctcccaggttcaagcgattctcctgcctcagcctccagagtagctgggactacaggtgtgccccactatgcccggctaatatttgtatttttagtagagactggatttcatcatgttgtccaggctggtctcgaactcttgacctcaagtgatccacctgcctcagcctcccaaagtgctgggattacaggtgtgagccaccacgcttggcctaaaagtataatttttaagcttttgaatgtatttggcataacttcttaaatgggaagagcataaatgatttttctcatgagaaggataatttttctattgattatgtaatctgatttctccgtcaaagtttactcaatgtaaggaaggttaacaagaataaccaagcccaaaatttcccagagccaaatttacatgactggcaagaaatcctggttataagagaacaattccattcttatgatttgcagacaatggaatattatttagtcataaaatagtagaataaatagtaacagtgtatctagatagcttcagtgtatccagacctgaatgcggggttccagttatctccatactcccaatttacatttcttcaggtatttgattgagtataatctatatccactagctttttctccttgtagaatgtgaaatatgggaccagaaggtaatctaaacctcatgtactatatggtcatctatttatagtcataaataataaaagaagactatttctgtggaagcctaattgttagttattgttttaatatcgctgttctccatgaatttcaaaagatcaagactggccaggcgcagtggcttacacctgtactcccagcagtttgggaggcagaggcaggcagatcacctgtcaggagcttgagactagcctggccaacatggtaaaaccccgcctctactaaaaatgcaaaaattagccaggtgtggtggtgggtgctggtaaccccatctgagaagctgaggcaggagaatcgcttgaacctgggaggcagaagttgcagtgagctgagaccatgccattgcactccagcctgggcaacaagagcaatgcttcatttcaaaacaaaaacaaaacaaaaacctcaaaagcaccagttagtactcgcaagaagctaaaatctgcctggtttcagatgtctgagtggagctatcaagcaggatgctgtagttgttgaaaaagaagcttattaatcttttagacaaagatctaagggtattaggtaaaggccatcaagaaatgaaaagggcctgattttaaggccatttccacatatgtagacaaagccttgtgtcttttagcagcctttgcttttgctgcccgctcagaccttttccctttgagacctcagtgaaacagacaacccaagactttgaaattttacagaagaggcacagcttgccatccagttatctaatgctatgtaacaatctactccaaaacttaatgacttaaaacaattgtcatttctttggctcactactcggcatgttaggcaggtctcatgaagaaggctcatttctcctctctcaatgtggcattagatggggtagctcagctagggggctgatgggttcatcttgcaagatagctcaccctactagctgatcaggtggtcctggctgtcagtggttgcttgggcttcctcacaggttggtagctgagttccaagacagcaaggtacaagtccatggcatttttgtgttctggccttagaagtcacatagcatcactcctaccgtactctttcagttgagacagtccaaaagatccaccttaattgaaggggaggggacaaagaccccaccactcaataggagcagcgtcaaggtcagtcgcattgtaaggagagcagctgagataggagagaccatttgaggccacctttttttttttttttttttgagacagagtctcttgtcgcccaggctggagtgcagtggctcgatcttggctcactgaaacctctgcctcccggattcaagcaactctcctgcctcagcctcccgagtggctgggaccacaggagtgtgccaccaagccaggctaattttgcatttttagtagagacggggcttcaccatgttggccaggctggtctaaaactcctgacctcaggtgatccacctgcctcgaactccaaaagtgctgggattacaggtgtgagccaccacgcccagccagagaggccatctttggaaaatacaatctgccccacccaattgcacagctttacctcaagcttggccattttcttcagcccccacaaaaggacttcctttcttccttccttactctcacccttccttcctgtcttccttcctttcttcctttctgtttttccttctttccctttctttttttgagaagtgaatcctgtatgtttggcaagcttctgaataagtgtacctttgaaaaagagggtttgattcttagtaagtgaaggcaaaatctagacactcggaactagtgaccagacagtggattggagatgtgtgtgctgggtcttttcttgggctaaagtgctttgaaacagttctataactgcaacctcttctctagcagacaaagaatcctctgaacaaggttctgaagtcagtgaagcacaaactaccgacagtgatgatgtcatagtgccacccatgtctcagaaatatcctaaggcagtaagtacactggagtaatcattgcatacgagataagacgataaataatgacagtggccagtcatgggggctcacgcctgtaatcccagcaccttgggaggccgaggcaggcagatcacctaaggtcgggagttcgagaccagcctgaccaacatggagaaaccccatctctactaaaaatacaaaaaaaattagccaggcatggtggagcgtccttgtaatcccagctactcaggaggctgaggcaggagaattgcttgaacccgggaggcagaggttgcagtgagccaagatcacgccattgcactccggcctgggcaacaagagcaaaactctgtctcaaaaaaaaaaaaaaaaaaaaaaaaagcaataatgacagtgtgcttagtggccacacaagtgaagggcaatccagttttaatgaagctgatggaaaatgcaaattgtttagttaaatttatgtttcgtgtgaatgaaggtcggctggtacagtcagataaaaggatcattttcttgagatagtgtaaatgatgacttgcttcaatacttctgtcctatctggatcctttgcctcttactcccatatcctccattgtgtcctgtaattcatgcccagcctgaatggtacccctgcctttaagtccatctaaggaaaacgggtttgctttgggagatggagtctggaagagaggacaggattcttcatgggagggctcatggagatcattccatttctgctgttttttactcaacctgtaattatctattaaacagttcagcctcaaagctctttcagaactgatttaagagacacgcatcaaaaaaatataaaaaagaaaaaaaagccggttgcggtggctcacgcctgtaatcccagcgctttgggaggccgagacgggtggatcacgaggtcaggagatcgagaccatcctggctaacacggtgaaaccccgtctctactaaaaatacaaaaaaattagccgggcgtggtggctggcacctgtagtcccagctactcgggaggctgaggcaggagaatggcgtgaacccaggaggcagagcttgcactccagcctgggcgacagagcgagactacgtctcaaaaaaaagagacacacatatattaataaatatccacacatatattcagtaatcattgtgttctaaccttgtgggttacacatgaggtagaaaacaattactcttaagtcgctgctgcctgacacatttgtaggtcctcaatatttgttgagtgagtgactgaataatagattcagagtgaattgatgattatgaacttcattagaaacattaaataagaatgtaggatgacctaaaaccaaggaggtagattgtgtaatataaagtctgttgtaagaaatcagaaaagggaatttatggtttcttttgtagaggttggaaaactcttccttgaaagctggaacatgtgcttgagaactgcaggaaaatgaaggatattggagtgaggagaaaaaactcaaagtcagtagacttaaacactgaatataacacatagttcaatttcagctgaggtgtggtggctcacacttgtaatcccagcactttgggaaactgaggcaggcagattgcttgaggccaggaatcaagaccagcctgagcaacacagcaagacaactgtctctacataaaatttaaaaactagctaggcgtgttggctcacatctgaagtcctaagtatttgggaggctgaggtgagaggattgcttgagcctgagagtttgaggctgcagtgagccatgatcttgccactgcactctagcttaggtgacagagagagaccctgtctcaaaaacaacagcaacgacaaaaccagttaagtttctctttgtctgaacttttatctatcatatctttttttagatattatgtagttatctgacaagtgtttgtaagacagactggagccacagaatgttggaattagataacacttctatattaccaaggtaaagaagattaaatgatgtgtacaggattattgagttagtgaaagagctgaaactccagttgaggtttttaaactgcgcaacctctcaagtaaccaaaaaaagcagccagctgatcagcaaactcatcttgaactgtaacaagccagccagatttcattaaaaacattacctaaattaaaggctcctaagtaagatatccttttagaaaacttccttgtgtgccccaaagtgttacttgagaaattaaatatgagaaaggagcctatctaagcaaaaaattagtgttattatcaagttaaacgtacaacacaggcacatatatattaaattattgttatattccaaaatgtccaggcatgaaaggtagagggggttgaaagctcagagtcaaaacttgagttctgtcactcttctgcctggggtcagctgggataaatggaaatgcagtagagtgtaatgtttaagagcatggagatttggttgagacagtgatttagatcccagctctgctacttaactagatatacagctttgagagagttttttaacctctattaggccttgtctccttatctgtaaaatggtagtattaagtatacccatctgatactgatgtggcaagattaaaataagggtttaatacagtgcccgagacaaattaagccctaaatgatagtgaggatgagtgtgatgataatagtagtctcatttctctgacctactggagttctcaatgttaagctttttttttttttttttgagatagagtcttgttctgttgcccaggctggagtgcgtgcagtggcgcaatctcggcttactgcaacctctgcctcccaggttcaagagattctcctgccacaggctcccgagtagctgggaccacaggtgtgtgtcaccacgaccagctaatttttgtatttttagtagagacggagtttcactatgttggccaggctggtctcaaactcctgacctcaggtgatccacccacctcggcctcccaaagtgctggaatttacaggtatgagccactgcgcccggcctaggttaagcatttttttttttttttttttttttttagagtctcgctctgtcacccaggctggagtgcagtggcaccatcttggctaactgcaacctccgcctcccgggttcaagcgactctcctgcctcagcttcccaagtagctgggactacagacacacgctgtcacgtccagctaatttttttgttttgagacctagtcttgctctgtcacccaggctagagtgcagtggtgcgatatcggctcactgcaacctccgccccccaggttcaagcaattctcctgtctcaccctcccgagtagctgggactacaggcgcacgccaccatgcctggctaattttttgtatttttagtagagatggggtttcaccgtgttagccaggatggtctcaatctcctgacctcgtgatctgcccgcctcggcctcccaaagtgccgggattacaggcgtgagccaccgctcctggcctccctcttcttaacagttactaatgaggagggagcaatcattttcatttgctctatggtcccagattactgtttctttagcaatagtgaatatcgagaacctcaaaattttttctcttatcgtgtcaatttcaggtgtcaggaatttcctgacccttatgtatgccaggtagtaagttttggcagccctgccccccagccaaattaggtggcacatctgagctaataagccaaagggtgttatctggcactaatccttgcagggtttctgccagcaagttcaaatgagttgatatatatttcaatggttaatattactaattgcatactttctttgctgttcagccccaataaaattacataatggaattagctcatgtaaagaaagtattctgaatccaacaaaaaatattagattgaaccatatattgtcatactcatagataaaaaatggttgacaattgtcagttctgtatagtccaacctaatatgaatgaataaaacatctgtgtgtacttggatcaaattttaatcttattcatcctcccatttcaccattgttaccagaataaacttgatgtagtctgcatgaatatggacttctgattattgtcccaggattattagcaagtttaaaaaatttgctgggtgtggtggctcacgcctgtaatcccagcactttgggaggtcgaggcgggcggatcacctgaggtcaggagttcgagacaagcctggccaacatggtgaaaccctgtctacaaaaatacaaaaattagccgggcgtgatgacgggtgcctgtaatcccagctactcaggaggttgaggcaggagaatcgcttgagcccaggaggtggaggttgcagtgagccaagattgcaccactgcactccagcctgggcgacagagcaagactctatctcaaaaaattgttttgttttgtttttttaactaggcaggtgtggtggctcacgcctgtaattctagcactttgggaggccgaggtgggctgatcatgaggtcaggagatcgagtccatcctggccaacatggtgaaaccccgtctctactaaaaatacaaaaattagctgggcgtggtggcgcgtgcttgtaatcctggctactcgaaaggcggagaaaggagaatggtttgaaccaaggagtcggaggttgcagtgagccgagatggttcccctgcactccagcctggtgacagagcgaaactcggtctcaaaaagaaaaaaaagaaaaataattttagatgtacaggaaggtgctatgtaatgtttatttagttttactcttttttcttcttttttggtaatgttatgaaacatgtatttttcaatcaataatgttttggggttctatccatgtcgatatatttagctttttatagttccttcgtcttaactgctgatcgatattgcattaaaataatacatgacctttcgtttagacagaactctaatgggtaatgattgagatttcatactgtgtgccaagtgcttgatattcatgactctctcgggcttcacagcagccttatgagttattctttccttcaagtaattatgaagtgcctgttttagtaactgccgggctctgtgggcacaaaatggtggataagacagacttggtctcttctctcttgaatcttacatactactgagggaaaatatgtacatcagtgagcaaataagtaaagcagatagctctgagattctaagtactatgaaggaaataaatagggcgatataatagcaatgcgaggagttgaactaggataggtgttgaggaaagatttctctgaggaggggacgtttgaactgaaatctgaagaacgagaagggaagagctacccatgtactgggtagactgtactcatctcaggcaaaggaattggtaagtgtaaaggccctgaggtaggaaagagtttgatttacctgaggagtgggaaatcaaaagaaaattaaagtttctcttgcacacatgtatattattattcccccaccccctttcaaaggaggacagtgaagtctagggagaagagcttgctcaagggaatatttaatacagttttactgagtgtatactgtgtgccagacattatgccaggcattgtgccaggcactagatactcggtagagactttaatggggccgggcgcaatggctcacgcctgtagtcccaacactttgggaggccgaggtgggtggatcacttgaggccaggagttcgagaccagcctgggcaacatggtgaaaccccgtctctactgaaaatataaaaattagtcgggcatggtggcacatgcctgtagtcccagctactcaggaggctggggcaggagaatcgcttgaacctgggagtcagaggttgcagtgagccgacgtcgcaccgttgcactccagcctgggcaacagtgctagactccatctctaaataaataaatacagattcccaggagccactctagacagtctgatataacacagaggcttttatacattttttatagcaatcactatgagaaatacatttctgcagtatccaatactcttataaaagaacaagtttcaagaaaccaggcttactattaacatttgccatgcattctcctattccactagatagtgtcttatcctgtctatcctatcctattgtttcttttttaaaaagctagtgaaacccgctaatctgacccatcaaagtgtcaaaaaaaaaccagatttttcaaaacactgtatagtcaatagttttcttgatgtttgggagagttggatgttatgggagggttattaagagaaaaacatcaaatatcgtttttttgtttgtttgtttgttttttgagacccagtctcactctgttgcccaggctggagtgcagtggcactgcaacctccacctcctaggttcaagtgattctcatgtcagcctcccgagtagctgggattacaggcatgagccaccatgcctggctaatttttgtatttttaatagagatgcggtttcaccatgttggccaggctggttttgaactcctgacctcaggtcaactgcccgcctcggcctcccaaaatgctggtattacaggtgtgagcctctgcaccccgccaaatatcttcatttttaagaagcaccccagatgattctgatgcagaatcattgagagatcttgcctgctgaatttcttaggggcaggcacaggagctccacttgctttctaagagaagaaaagatggggtaagagccggtctttggagaagtaagggcattggcctggccagctagtgaaaagaagcatacaggagggcactcacagatagaggggagagcgctatggctggtagggaaccatcctggattgactcattactggtgtcacgatactgacttgcctgccacactgtggaaggaggagacttctgttggccttggtgtacttctggaaacttcctcctggtatccctgatgccaacatggacacagggacaattaaaagaaaggacagggtgatggcagcgactgtgaagtgggattgaaaatattggagttcctggccaggcgcggcggctcacgactgtaatcccagcactttgggaggccgaggcgggtggatcacgaggtcaggagatcgagaccatcctggctaactaaaccccgtctctactaaaaatacaaaaaattagccgggtgtggtggcgggtgcctgtagtcccagctactcgggaggctgaggcaggagaatggcgggaacccgggaagaagagcttgctgtgagccgagatcgtgccactgcactccagcctgggcgacagagggagacactgtctcaaaaaaaaaaaaaaagactggagttcctgtgggagggcagggtggtctggtggcctcctcagtggcatgcacttgagtgggcatgggaagccctgggcagctctttgctatagtggctgaagcagctactgaatctccagtatcagtcaggaggtcttttaggtcctaacctcaggaaaatactagcttggttttcatgaagaacactgtggccagttgcagtggttcatgcctctcatctcagccactttgggaggctgaggtggacagattgcttgagtccaggagttctagaccatcgtgggcaacatagcaagaccatatctctattaaaaaaataaaaataattgtccctatgtggtggtgtacctgtggtcctagctacttgggtgactaaggtgggaagactgcttgagatcaggatgtcaaagctgcagtgaaccatgatcacacaactgccctccagcctgggcaacaaagcaagactctgtctcaaaaaaaaaaaaaaaagttgagaaatagctgtttagaaatttatttatttgtatataatcatcgggtacaagcacagttttgctgcatttatatattccactgtggtgaagcctggagcgacgcacattgttcccaccaagcaacctcccatcatccaccctccccgccgctccgaatcagacatttttttttattctttctatatgtggagatgactgagaaaggctgtcctggagaaatgatccactggactgtgagagagaagagctgggttctctttataaatttcctatcaattaactatggcaattaagtcaagttgtcttttgatgccagttttacctataaaaggattctcagggaataatatagtagatagattatacctatggttgatttctagagagtaccgtaatgggttaattggatggcgtataagcacttggagcctcactaacctttaggaactaaataaacattttccttatcaggattcagagaagatgtgcattgaaattgtctccctggccttctacccagaggcagaagtgatgtctgatgagaacataaaacaggtgtatgtggagtacaaattctacgacctacccttgtcggagacag

SEQ ID NO: 13840 - DNA, 402 bp, Homo sapiens
ttaacatcttaaatggaaatacaccagagcaggtgaattacactgagtggaagttctcagagactaacagcttcataggtgatggctttaaaaatcagcacgaggaagaggaaatgacattatcccattcagcactgaaacagaaggaacctctacatcctgtaaatgcagacaaagaatcctctgaacaaggttctgaagtcagtgaagcacaaactaccgacagtgatgatgtcatagtgccacccatgtctcagaaatatcctaaggcagattcagagaagatgtgcattgaaattgtctccctggccttctacccagaggcagaagtgatgtctgatgagaacataaaacaggtgtatgtggagtacaaattctacgacctacccttgtcggagacag

SEQ ID NO: 13841 - DNA, 3870 bp, Homo sapiens
tgtcctctgggatctcttacagcttgggaacagagatcatgtcacatctggtggaccctacatcaggagacttgccagttagagacatagatgctatacctctggtgctaccagcctcaaaaggtaagaatatgaaaactcaaccacccttgagcaggatgaaccgggaggaattggaggacagtttctttcgacttcgcgaagatcacatgttggtgaaggagctttcttggaagcaacaggatgagatcaaaaggctgaggaccaccttgctgcggttgaccgctgctggccgggacctgcgggtcgcggaggaggcggcgccgctctcggagaccgcaaggcgcgggcagaaggcgggatggcggcagcgcctctccatgcaccagcgcccccagatgcaccgactgcaagggcatttccactgcgtcggccctgccagcccccgccgcgcccagcctcgcgtccaagtgggacacagacagctccacacagccggtgcaccggtgccggagaaacccaagagggggccaagggacaggctgagctacacagcccctccatcgtttaaggagcatgcgacaaatgaaaacagaggtgaagtagccagtaaacccagtgaacttgcccacatcatggccagcaataccatgcaagtggaagagccacccaagtctcctgagaaaatgtggcctaaagatgaaaattttgaacagagaagctcattggagtgtgctcagaaggctgcagagcttcgagcttccattaaagagaaggtagagctgattcgacttaagaagctcttacatgaaagaaatgcttcattggttatgacaaaagcacaattaacagaagttcaagaggcatacgaaaccttgctccagaagaatcagggaatcctgagtgcagcccatgaggccctcctcaagcaagtgaatgagctcagggcagagctgaaggaagaaagcaagaaggctgtgagcttgaagagccaactggaagatgtgtctatcttgcagatgactctgaaggagtttcaggagagagttgaagatttggaaaaagaacgaaaattgctgaatgacaattatgacaaactcttagaaagcatgctggacagcagtgacagctccagtcagccccactggagcaacgagctcatagcggaacagctacagcagcaagtctctcagctgcaggatcagctggatgctgagctggaggacaagagaaaagttttacttgagctgtccagggagaaagcccaaaatgaggatctgaagcttgaagtcaccaacatacttcagaagcataaacaggaagtagagctcctccaaaatgcagccacaatttcccaacctcctgacaggcaatctgaaccagccactcacccagctgtattgcaagagaacactcagatcgagccaagtgaacccaaaaaccaagaagaaaagaaactgtcccaggtgctaaatgagttgcaagtatcacacgcagagaccacattggaactagaaaagaccagggacatgcttattctgcagcgcaaaatcaacgtgtgttatcaggaggaactggaggcaatgatgacaaaagctgacaatgataatagagatcacaaagaaaagctggagaggttgactcgactactagacctcaagaataaccgtatcaagcagctggaagaacagctcaaagatgttgcttatggcacccgaccgttgtcgttatgtttggaaacactgccagcccatggagatgaggataaagtggatatttctctgctgcatcagggtgagaatctttttgaactgcacatccaccaggccttcctgacatctgccgccctagctcaggctggagatacccaacctaccactttctgcacctattccttctatgactttgaaacccactgtaccccattatctgtggggccacagcccctctatgacttcacctcccagtatgtgatggagacagattcgcttttcttacactaccttcaagaggcttcagcccggcttgacatacaccaggccatggccagtgaacacagcactcttgctgcaggatggatttgctttgacagggtgctagagactgtggagaaagtccatggcttggccacactgattggagctggtggagaagagttcggggttctagagtactggatgaggctgcgtttccccataaaacccagcctacaggcgtgcaataaacgaaagaaagcccaggtctacctgtcaaccgatgtgcttggaggccggaaggcccaggaagaggagttcagatcggagtcttgggaacctcagaacgagctgtggattgaaatcaccaagtgctgtggcctccggagtcgatggctgggaactcaacccagtccatatgctgtgtaccgcttcttcaccttttctgaccatgacactgccatcattccagccagtaacaacccctactttagagaccaggctcgattcccagtgcttgtgacctctgacctggaccattatctgagacgggaggccttgtctatacatgtttttgatgatgaagacttagagcctggctcgtatcttggccgagcccgagtgcctttactgcctcttgcaaaaaatgaatctatcaaaggtgattttaacctcactgaccctgcagagaaacccaacggatctattcaagtgcaactggattggaagtttccctacataccccctgagagcttcctgaaaccagaagctcagactaaggggaaggataccaaggacagttcaaagatctcatctgaagaggaaaaggcttcatttccttcccaggatcagatggcatctcctgaggttcccattgaagctggccagtatcgatctaagagaaaacctcctcatgggggagaaagaaaggagaaggagcaccaggttgtgagctactcaagaagaaaacatggcaaaagaataggtgttcaaggaaagaatagaatggagtatcttagccttaacatcttaaatggaaatacaccagagcaggtgaattacactgagtggaagttctcagagactaacagcttcataggtgatggctttaaaaatcagcacgaggaagaggaaatgacattatcccattcagcactgaaacagaaggaacctctacatcctgtaaatgacaaagaatcctctgaacaaggttctgaagtcagtgaagcacaaactaccgacagtgatgatgtcatagtgccacccatgtctcagaaatatcctaaggcagattcagagaagatgtgcattgaaattgtctccctggccttctacccagaggcagaagtgatgtctgatgagaacataaaacaggtgtatgtggagtacaaattctacgacctacccttgtcggagacagagactccagtgtccctaaggaagcctagggcaggagaagaaatccactttcactttagcaaggtaatagacctggacccacaggagcagcaaggccgaaggcggtttctgttcgacatgctgaatggacaagatcctgatcaaggacatttaaagtttacagtggtaagtgatcctctggatgaagaaaagaaagaatgtgaagaagtgggatatgcatatcttcaactgtggcagatcctggagtcaggaagagatattctagagcaagagctagacattgttagccctgaagatctggctaccccaataggaaggctgaaggtttcccttcaagcagctgctgtcctccatgctatttacaaggagatgactgaagatttgttttcatgaaggaacaagtgctattccaatctaaaagtctctgagggaaccatagtaaaaagtctcttataaagttagcttgctataacatgaa

SEQ ID NO: 13842 - DNA, 6960 bp, Homo sapiens
atggtcctggcagggctcatcaggaaactcggtcatcagctggccgagatcagggagcgcgctctcaagagtattctctgcaagattgagcacaacttaatctgctacgctgatctcattcaggagaggcaactttttcttcatttgctggaatggttcaatttcccgtccgttccgatgaaggaagaggttctgaacctgttaagcagattggttaagtatcccccagcagtccaacatttggttgacgttggtgcagtagagttcttatctaagcttcggtctaatgtggagccaaatctgcaggctgaaattgatggcattctggatggactttttcttcttccttcggaagttcctgcactatcttctgcctcataccaaaccaatcaaactgaattgtcaaaaaaccctgaaatcttaacaggatattttccccaagacaaaagtaatttccagcagatggaagtgccgccacgaccagtggtaaatcagactgtgaagtgcttgaagttttctacatttccttggctacccctgaccaccacagacagacatgtcctctcctctaatgaaagctctttaagaagtagtaaccacactttaatctggaacacctgtgaactattgaaggatgttatcatgcaagattttcctgctgagattttccttcaaaggccaaaaattgttcagagccttttatctctgttgaaactggcctttggagatggaaagcatcgcctggcattacagtcggtgtcctgcctgcagcagctgtgcatgtatttaagaaacagacttaactttcaccgagatccaggttttttctccaataaacacgacacagtttcccaaaattcttctttgtcttattgtcatgaagcaagaggtactcatcattcccagaatccttccccaggaagcagcagccctcggccttctgtggttgggcgcacaggccagcgacccagaggagatggccaggactgggatgcagcgtcctctagtggaagtagtagtcatgctcatgtaaactccaggatatccgttcattcacctttggatatgggacacatagatctgccagagctggaaactgaagacacattggaactacaattccagcagctcagtcttccccagttttgtgtctccattctggaatcagctgttcctctcttaagaacaggtagcagacaagtgataataagagttctggaattgcttacagaggatatgacacttattggtgaagcaatttcaacagatatctgggatgacagcagcctttttggtatagatatgaaggagaaactactcctggtgttgggagcccttggagaaaccatgtgctaccataaaagtagtatcagtttggagcagccagaggtgatgcttgtgcaccacagaatggcctttatcagcatttccctgtttgcagttcgactgctacaaacgcttctccctgttgaaaaggcaagcgagtttttatcagagcctatgtcaacagcattatttctcctttctttggacatgcctatttctttggaatatccaaatattcatgaagctgttgtggcctatttggaacagctgaattctgaaaactacagtatttataaacgaactgcagaggccgtttattcaattgaatgcacctgtaacttcctgtctgatattgggaaagagggagagaagaatctcttagaattagtggagctggcagaccaagccttgcgtagcttttcctatcatcagcatttcccgctaataaaggaaatcatcagcatttgttcaaagatctggaaatctgctcaggccagtccattactacaaggagaaagtcagaaggtgcttctccatatgttgtctcacccattgccacgagtgaaagctgaaacttaccactgctgtctggaaatcacgaaggaatgtttaggtgtccataatgtcactaaacccgtgtcttcactttgcaatggaattcattttctacttcatccaaaagttctgtatgaaatctctgtatttggcattcaagagcccgaaagtgaggtgaacactgctgccaaggccattctgttatacctgcttcagggacgattgatgatgacagcattgacctggaacaagtttattgaatctctctgtcctgtcatcccaatactacagggctatgccgacacagaagatcctctgggtaactgcattctccttctaagcaaagcaagttctgacacagaagagatgcttccgtgtactacccgattaaagtccatgctgcgacttttgctagtgaaaaagccatcggtccgttcgctagcattaaagcttttagcattccatcttaccagtgaagaaggggctgatacaaagcgtcctctaatagacgccagagttctctccagagttactgatttattcattgggaagaaacctattgaactcagactggatgacagaagagagctggttattaagttggagactgttgaaaaggtatatgaaatcttcacctcagatgatgttgatctcgttttgagaaagtcagctgctgaacagttagctgtgattatgcaagatattaaaatgcatgctgtggtgaaaaagttatgcttaattgacaaaataattgagtatttaaatgaatgtgtgagtcaagatggcaaggttgtagaatgtttggtacaaccatgcctcacactcttgaggaaggttttatgtggtgatccagtcatgcgtgtttcgctctcgcaacagtcttctcttttgaccgtgttattcagagtttccttaatatttcatgaagattgtagtgtcgtgactgaagttggagcactattttgtcttctattatttgatgaagtatcgagaatggatatgtggtctgttaatccttccaataaaccttctttgccatcggtcttcagtttgcctgtttccgtttttagaaggtaccatctacctgttcatgtaattggacaccatgctgtgagtccttactccatagttttgcccttatctgctgattgtttggccttgaagccggtgtcagatatgctgagaatagcttggaacctgtcatggtatcatgggagtgataatctgttgaagcaaatgaactctgaaactaaaacgcaagaaattttagatgcattgaagttatctacagaggacatcctcactctgaagataacacacatggctagtgggctgcaggactgcctccattccattgttcaggctgcaacccacagggaagttagggctgctgtcaccaggatgagtttttatcttctgaatgacagattgtctttaaagggttgccctggtccatgtggggttaccttgaagtccttggcttggcacaccgcactaaacaggtttttacaggtgcttcctgcttgcactgaagatgagaaactgctaatagatatcatacattttttaaataaattaataaaggaacaaagaaaaaattcttcactagaacttctaaactggattctcgaattacttcttagacatagtgcaaacccactgttagacctcttggttctgacagagtcacaggcacgagaagaaacagatgatatccggactgctgtcaggcaacaacttcagaaagaactgattgctctttttgataccttgctgctcaatttcatggaagttactgacaggaaatgctcggaacttctttacgtttttcaaacgcagctggctctgaaactgctccagtgtctgaaagtgacggatgcgcctcatttctatggcctgccgtcccttgagcggaccttacgagggatggctaacctcactgcgtttccgggatggagctcacactctcctctcacaaagcctctagatatctgtgtgaagtacttgtcaggtctccttgaggtcattacttctttttatgtggagcgtggaggaaatgctatgtccttcatgggaaaaggtgttacaaagagcacaattctttgcttgcttcacttatcccatgagatgatggcccaggctgggagcttggagtggatgtcactttggttcttgcctttgggtagtcatagtgaagaacatattcctactcaacaaggattggcttggttgattccattatgggttgatcgggacccagaggtgagattcacttcactgggattaggatcagcactgaccacccttgaaacgggctgtgtggccttagcaaacagttgtcagaacatttccggtgggctctggggaactgtggtgaacattcttctggaccagtcagaatgtagtatggtgcgccgggaggcggcatttattcttcagaatctccttgtaattccaatgcctacagaaattataaaggattatacttggcagggtccctgtgttcatgatgaggactctggcctatcgctcattggaaaacctgcccttcaggctcttttatatcactgccatttttatgaacatttgaatcagatggtaaagcattgttacctaggacggtgtatgtttgatttgaatttttctgcttttgatagaaattcagaaagcaatgatttaaatggtttagatgactcattcaagttttggagggctccatctaggacaagtcaggatcgagatccaagttctctctccacctcagaaacaacggtggcaccttcattggggagtactgaatttcagccacttgtgcagtcaacaacacttctacctgaagcctcccatgaccagtttgtggctcaaggtcaccaggaaagtacatcaccacggccacctcatgattcatctctttctgctcccctgcccaaactgtgtgtttttgttactccatctcttctttcagcaatgtgcagcctcttggacaacctcttgacgattgctcccagagacactgcaaaggcttttcgacaagctcatctcatagaacttctctgtagcattgcagatgctaccctcatacagacatgtgtccaggaactcagagccctgctgccttcatcacctccagctgaacacactcaggctcaggtttcctttctcctggaatacctatcctctttgtccaggcttctgcagtcatgtttattggtggagcctgaccttgtgattcaggatgagcttgtgaaacctcttatcaccaatatcattggaattctcaccatatgtaccaaagatgtattagataaagagttaatatcagctttttatcacacatggacacatttatttaatcttctggccatgctcctgaggaaagctggtgccatcacactcccgtttgttaccgtggccctggccaagcactggacagcggcgattgatatgttctgcacatgtgcaggcttgtctgccacgtgtcctgccctgtatactgccagcttgcaattcctttctgttctcttgaccgaagaagcaaaagggcatctccaggctaagagcaaaacacatttatgctgtagtccaacagtggcttcacttcttgatgactctcaggaaaatcagaaatctctagaacaacttagtgatgtaatccttcagtgctatgaagggaaatcctccaaagatatcctgaaaagagtagctgcaaatgcattgatgtcactgctggctgtcagtagaagagcacagaaacatgctttgaaagccaatcttatagacaattgcatggagcagatgaaacacataaatgcacaactgaacctagattctctgaggcctgggaaagcagcattgaaaaaaaaggaggatggtgttattaaagagttaagcattgccatgcagctcctaagaaactgtctttatcaaaatgaggaatgtaaagaagcagctcttgaagctcaccttgtccctgtcttgcactctctctggccttggattttgatggatgattcattgatgcaaatttctctgcagctcctttgtgtctatactgcaaattttccaaatggttgcagttctctttgttggtcaagttgtggacaacaccctgttcaagctacacatagaggagccgtgagcaactctctgatgctgtgtatcctaaagttggcttcccagatgccactggagaacaccacggttcagcagatggtttttatgcttctttcaaacctggccttgtcgcatgactgtaaaggagtaattcagaagagtaacttcttacagaacttcctctctctagcattgccaaaaggaggaaataaacatctaagtaatctgactattctttggttgaagttactcctgaatatatcatctggagaagatgggcaacaaatgattctgaggcttgatggctgtctagacttactaacagagatgagcaaatacaagcacaagagcagccctttattgcctcttcttatctttcataatgtttgcttcagtcctgcaaataaacccaagatcctggctaatgaaaaagtcattactgtgcttgctgcctgtctggaaagtgagaatcaaaatgctcagaggattggagcagctgccctttgggctctgatttacaattatcagaaggcaaaaacagctttgaaaagcccatcagtaaaaagaagagtggatgaagcatactccttagcaaagaaaactccttaattcttcctgagtgccatgggatgctacaccttgaagctgacagtcatcaacaggggagctaaagttgaagccagctgtgtgtagcagctgttacctgaagacgtgctacctctctacaaagtgttgatccccttctttcccatgagagagagaactggtgatactccaacaccgtccagttgtggcagctctccagaagtaatagcagctgacaactttctgtgccttttcctttctgttgaaaaggcatagaaagttctgggaacataaacatttttacccttttctatgccatttattttgtaaaaatcctatttaacagttatttaataaaacaatatttttagaaactaaaaa

SEQ ID NO: 13843 - DNA, 28344 bp, Homo sapiens
aggggtagtttagatagaaatggagagaggggaatgtgtccccagaaggagaaaggaggaaattgatgacagttctcctgttcagcagttttacaaggacccattttaataaggtacacacatatatatacaatatgcgctggtgaatttgagtaagtatatgagcttgctacgtgaaagctaaataaagcttttttctgtagatgatgagtctttaagaatgattgttgttcttttccatattataagcaacttatacagtcttatccacgcagaacattctcaaatattaatgatttatcaaaatccagtgaatttcacatgatagttgaaacctagcaatatcttttaagtagaaaatgttctttattcacaacagttttgctccagattaaatatttcttcaaggcagtttgatttatattctctgcagtgctatgaagggaaatcctccaaagatatcctgaaaagagtagctgcaaatgcattgatgtcactgctggctgtcagtagaagagcacagaaacatgctttgaaaggtgagccacatgacacatcagctgttttgatggcattatcaattcatatgttttgttgcttgttcaagttaattttctttggactcaaaatgtaaaaaacgtatagtataatctcagtgtcactaaaaataattttttttcccatacagaagcagtaaatatgcattacttttcaaataaaaagattagacatagtttgtttttgtttgtttaatatgtgatggttcttgctctaaagaacctatatgtaaatattagggaagctaaaaggtaacacattgagtttcattataattaaatattactatccagaagcactcactgcatacctgaacaaaacccacatagttttgatggtaaaaacagcaacagatgattccatattttcgtataaatttccctcttgagtgttgtaatttctcatttgggaatcggagaatgtagatctgagaattaaaagagaataatggcaacatcaagtccattaatatcaattgtgatttgcgactacaacaaatgatgtattcctcaagttgtaaattggatttgggtagtatcttactaaaaactgaaaacaagtggacttcagcattttagttctcttacttatcccccctctgattcattaatctctgactgaaaattctaaaatgaagtgggtcagaaatagaaaatgttacctttttgagaatctgattggtatatgtggttataacttacttggaaatagaatatccttttgactactgcagattttgtctttcagccaatcttatagacaattgcatggagcagatgaaacacataaatgcacaactgaacctagattctctgaggcctgggaaagcagcattgaaaaaaaaggtaacattctgggataaatgaatggctatatatagagaccattctccagtcctcttgtgcctagaaatgagcacgagcttgaaatgagtgtctcatttagaagaaaggtacagatggataaattaatgagacttctacattagcagattgttggctttttttggtcttaattcttacttgaagatctttagacaacatctgtctattatgtactgttgttattataaacattggaaatatccacatatacatgatactatgccagataaattttttatactacaaaaagaaaatctttatctcaaaacaagcataggttaactaggaatgagatctgtaacaactataatttattaagagttttctatatgtcagccactattgaaacatttcatatttattatctcatgaacaaacactcattacagcatagtcacacaactggtaattgatggagctaatatttgccccaaatctgggtggttgcagagctggtattcctcatctctgtttatctcctcctgtgccttctgaatatctcctctagcattgaatctgctggactcatgtttaaactgcatgctcaggtaaactgaaaataacatagttatataataactactgtggttaacaagatctgccacccacttattcaacaaatgaaagtgtgtgaatagtataaatatataaatatacatatatgtgtgtaggtaaggccgttatagcagcactctatgtaataactagtttctactgcatttaagaaaccaagacaaagtcttatttaataatgtaattgatgcaggagattgattgtatgtttatcagttctttttttttttttttttgcctcttttcctccctagccaaaggcccttcatcattgagaaagtcagccaacacctgatattattgaaaatctctcagtatctgcctcactttattgagatgaaacatggaggctatcatatatccgagttcctccatgcttgatagaacagaaatagctttttcatggtgaatgtgcttcttgagatatggtcatctttcagagatcgttagcctgtcagttccctcaaagttacagtggttgggcatgattagagcacacctgcattgtcccgtgacccaaaggggagggaattactatacacaaaaagtgaagtatgctgttgcattcacagttttcaactgctttttgtttaaataggaggatggtgttattaaagagttaagcattgccatgcagctcctaagaaactgtctttatcaaaatgaggaatgtaaagtaagtagaactacttttcaaaattttaataggagtactggtattaagcagtttaatttttatgtgagataatgtagtaggaaaaatggaaagctctgacttttaaatttttagacacacagttgattggtccttaaactcagtgttaattgtcagaaatgtgtgtatctaatcattattcatcgacactgattacatttcttcgcaaacttcagcctcattctgtactcttaggtattttaaatgttttacatatggaatgaatggctggatgtgttttataaggtagattctttcaaaacgggttgtcaaaacaactcttcaaggaaataagtgaagctatctgtatctataaggaaagaaaatgaagagtttcctgcttcaaaggagaagatagttagagctgctacctagtgtggccacatccaccgagaggaagtttcttctagctctgctgactccctgtgaccatttacatggcccttctgtctaaaaatcactgagatgttttgcttcgtctgtaagcactgatgatgttttaaaccattgtatcagtactactatagaggatataatcttgtgaacactctgatttgctttgtctatagttttacaacacttttgaaatactagattgatgctttaatgcagaaatactagattattctttataaaagctggccacgaaaataaaaattttaaaaaatactaaattaaagctttaatatagaaagcaaagataaattatggaagcttttattgccttataaatttttacctgttttgctcttacttgtggtaagagcacaactggaaaaaccataccacatctggaaaatggacatgttgaacacacttactccttaagcgatgttaaaaagccagatacatgactcacaatttatatttcaaagtagtttgatggaaattaagtatttatttatacaatttattaaaattccctatatatgaatttatatgaactttttctcaagacaaaagtgccattaataaacttaatgattccttcatgcttatgatattatgcttgtgactggatgtacagtcagtatttgtgtgtaaatttaaatatataaatttcatgtgtatgtgcagttaatattcattcatgacaccttattcagggaaatactctggaatactttacatgtgggatctacctataaagatttatgaagtgctaacctggctactagttataaatattgtgctcaatttgtatcacattagccatttacaaaagtgtgatatctcaataagtcaaagcatttctgtatttctaagttgtttaataagaagtaaatccaaagaatattaagattatccttgagtataaatataatattatggaggtagggattgttaatttcaatttcagcttttatcaggtgtatggcatgttctcattattaatagttggccactattgggtaattcaccaggtcacccactgccaccccaccctgctgtttgcatatgcataacattaggggttttcatactggaaggagcatggtggctgtgaggtaaatgaattaaacagtggacaaggttagacggaggggactgtcatagtccagacaagagatgatgacaccttaacttgagcaggtagaaaggagaaggagggtagggagtaaatttgaggcattgagaagaggaggaatgtagaatgacttccaaactccagtttaagccactgcattatcatgcattaagagtgcatgatagagcagagcacaggtgtgagagacccgatattcatgcttgcacgtgctagcctcaagagtctttggggcatccaggtgaaaaatggcttgtggcctgtagattttatgggtctgggactctaaggagtgatacaagctggggatattaggagttatcaatgtgtagatggtgtttgtggtcctcactattgttgaaatttcccaagaaagtatgtaatgaaaaccaaggtcatatctttggaaaacaggaacatttaagagggggcagaaaacaactgagaagggaatactggagaaggaatttggagattgcattaggccgttcttgccttgctatgaagaaatatctgagactaggtaatttattaaagaaaagaggtttaattggctcacagttctgcagggtatagaggaagcacagtggcgtctgcttctggggaggcctcaggaaacttccaatcatgacaagaaggcaaaaggggaacaggcacatcacattactagaactggagcaagagtgagagagctggcgaggaggtaccacacacttttaaatgaccagatctcatgagatcactcactgtcttgaggaaagcaccaagccatgaggaatccgcccccaagatataaacacctcccaccaggcctcacctctagcactggggattacaattcaacatgagatttgggcagggacaaatatccagactcttatcagaaatgatccaggatagagcagcagcggggaaattaagagacatatagcaaatgccaccgtgcttaagcgttgttggcaaccacaaaagtagaagcggcctcaatagaatcatcagggcagaaaataaacggtaatgagctaaagattaaatgtgaggcagggaaattacagcaataataatgtagaagtttggtcatgaatagtggcattaataatttaggacatataagatgaaaggaaatgagtatgtttgtttctcttaacacgtaaactacttgaatacaggcacagaaatgagcaaattggggacgagttgtttaagagatagcaagaggagaactaactggtggattaagatccctgaggaggcaggaagagctgtgtttcagaacacagatggatgtatcaatctctggcaggcaagaagtggaacacctctttgtcactaccgggcagacaggaaggatgaatggatgaaaatacagataaactatgtggacagaatggcagagtagataaaggagtttgtacttaatcgtttctgtcttctctgtgaaatagtaaacaaggtcatctgctgcagatggagggccgtgtgccacagagagtggtgaacaagggaagaactttagggagagcactgggaatgacttcagtgcttacggagagtgttgaacattgggaatcacttctcttctgccacttgatgctatgtgaaatcgtatagggtgtgtgtatttatgtgcatgctcacgtgcataatcatgggtctacaaattacctcggaattcttgttcatttaaaatagatattgctgcacttaaacagctatattttatctgcaatattgtcccagggtaactgatctttgtaataaagactctgagttacttcagaatttttcaatttatcataatatttagactgaattttatatattcaaattactcaaaaactgtaatttactttgagtatatacacacatacacagagagagagaaggagagggagagagggtgggcaaagaggactcagagttgatcagaatgtttacttaaccagaaattctcacttcttggccagttcatagcatttacaggaatttattcagtgttgtgagatatcactttgctgtttaatttacatgttacacaggctattttctatgcttcctaacttagtggtacatcttaaccaccctggtgttgaagcgacgtcctgagattggtcaggctcgtggtcagggcagccatgtgtggagcccaatggggctggggcaggatgctgaagccatccacagggttctccttgggtcttatgttgatggctttctgttgttgttttgattttaatgttatattttcatatattcagactaatgctgtctttttcccttccttcaacaggaagcagctcttgaagctcaccttgtccctgtcttgcactctctctggccttggattttgatggatgattcattgatgcaaatttctctgcagctcctttgtgtctatactgcaaattttccaaatggtaataggatccaatactgcctttcaataatataccaaaatactagttttataaatgttgttaaggtggactggaaaaactaatacatattttgaagtatttctctgatttattgaggatatgatgggcaaaggcaagctttctcgtaggtattatgagagcagacagatattttagtgtgtttgttgacatgagagagtcattggcagcgcagggaatagagagggaggactggtctgattatctggcaatgggaaattgagtttagtaggaaaattgagaggataaaaattatgatgtaagacctcaaaagccacgtgaaggttagaacttctcatagattctagagcaggagactggcatgttgaaagttctcataacagttggtctggtgatacttgatatcactagggctcctctttcgctcatgcacttgatagacactttatcaagagcctgtggtgggccatgcattgtgagttctggtgagagtgatctgaaatgagataggaggacaggtcatgtagggcctcagaggccagagtagggagtttggatttttatgtgagtgtaacaggatgacattggcagttgtaagctggtgagtggcatgatttaatttgtgtttaagaaggattaggctgggtgcagtggctcatgcctgtaatgccagcactttgggagacccaggcaggcggatcacttgaagtctggagtttgagactagcctggcaaacatgaggaaaccctgtctctactaaaaacacaaaaattagccaggcatgatggtgcatgcctgtagttccagctactcaggaggctgaagcaggagaatcacttgaacccaggaagcggaggttacagtgagccgagatcacgccactatactccagcctgggcaacagagtgagactctgtctcacaaagaaaagaaaagaaaaattgccctgggtggtatgtggagaatgaatgattgggagcaagtctagaagcagggagacttgtcatggagatataatggtggcttgggcttgagtggtagctggagagattgagagaagtagacagattcagtatatagctcaaaggtagagtcaaggatacctgttgtgggaggtaggaaggaaaaaaaggtgtccggggtgaacttcatttggagaaatgagcctgagtgcacagtagtgccatttactaaaatggggaagatttaaaagaagcagacttgaagtgagaaagtagtaggaatcaagagttctgtttggtcttgttaagtctaaggtgttgatgttcactcaagtgaaaatagtaagctggagttgaattcaatggagtgtagagataagtttgaagatttcaaatgttgggaatattattagttatttattgctacaaaagaaattactctaaaatttagcatctgcaaacattaatcatttcattatgccacggcttctgtggctcaggaatctgggcgtggctaatctgggtggtcctcgctcagagtctctgcaatcatctgaagtcttgactgggatagaggatccagtgtgactatgggagcctcaattccttgctacttagggctgtctcaaacgacccagaatgagtgggctgagggcagaagttatagtctcttataatccagtctcagaagtaactgaacagcactcctagctcttgtgggtcacacataccaaccctggtacagaggcaggcgccactgggaccatcttggaggctggctaccacaggagtcattgtcatgtagattgtacttaaagccacgtggctgtttgcgattacccagggagaatgtgtagatggagaagcagaaacccatgaccaagttctgaggcacatcaacatttggagttaatcaaaagatgagaaaccagcagaaaaaaaagagaaggagcagccaatgagataacagtgcacagtcacagaaagtcagagaagggcatgctcagttgtgtggaatgctattgaaaattctgctaaagtgaggatagaaaaaatggctgttggacttagcagtattgatgttcttttggaccttgagggtaattttagtgcagtgccagaacagaaacctacttagtgtgagctgaggagagaagatgaagaagtagaggagacagcttttccaaaatgtactactcttaagaggacaaagaaatggagcaacagcaagagacagatgtggagtcaaaggaggagtttttgctcgtttttaaagatgtatgtttttaaggcatgtttattaacttaagggattgggagaatgaggtgcaggaaagagtgcaggtaagagcccagcctgagagggtaagagaggtgagagctagagcacagctgacaacagaagcggagggaaggctgagaggaaggatgtggatttaggagggctggtagacttgatgggaatgatgagaaaattcccattttgaatacttctgctttcttcatttaggagagaacactgaccactaagaatgagcaaagacaaggagtagaggtgatgtgagaagaggagaaagtgtgaagtagctgtttttagaggaaggaaagtaaacacaccagagaagcaaagtaggattgctggcagtgttaagtaccacttatggtcataaatttaagaaaataaattagaatttatggtcataatttatggtcataaatttaagatttaaattttattaaatttatggtcataaatttaagatttgactagcaagtttttgtactttcttctaacaacactcagtagcccagcaactggggtctctgaatatcaaaggttatacagagaagggactggaactcacaacagttaaggagcccatctagttactgccagatgctgttgatggcttattcctttgaataatctgccagatgctgatgatggcttattcctttgaataatctgacacctctggagctgtccatttcgatacccaactcaggttgtctccagtcagcacaaagagatataaacagaccttcaagctcttgaacttgaactgtcattgaagcatatgtgtacaggattgtccttgccttcattctgtgctgttaactttctccattccttaggtctggtgggaatgtctcctttcagtgcattttccagctccactagtatatcttttgtttgtttactcatcttttatgagtttcttttacagaatgtatttgattctgatcagtttatacttaagttggcctcctcgtatgaactttcacaagtcaattataccttaggtttatgtataatacagtcttattgatttaacattaaaatatatttctaatttttttttctccctcaataagtctcattcagttacttaatttcctgagaaacactgaaccctggaaagcctgtagatgccacttttggctcctgctatgctaagctgtatgaccttgaacaacaaactggcttttctgagctccatatctttgttgaccaaatatagaaaatagtatttgttttgtccgctttcccagggatattatgttccttatttgtatgttatgtaaaatgaaggcattagacaagttatctcccatttctaaaattctgttcctttacacaggcctttatttagatgttttctttagcaactattaaaaaccctagtatgtttattttattctttttttaaaaataaacctggtgtcttaaagtgctttagtgagataattaggccctcagtgaggacagtatatctattaggttgactgtagacaccaacattagcctccattgctaatttgcagttcacaggttaatggcctagtcattttgttagacagatatgctttgccacttagtgtcttcaaaaactaaacagggaaactgagaagacattgtgataggctgttatttttgaaggttgcagttctctttgttggtcaagttgtggacaacaccctgttcaagctacacatagaggagccgtgagcaactctctgatgctgtgtatcctaaagttggcttcccagatgccactggagaacaccacggttcagcagatggtttttatgcttctttcaaacctggccttgtcgcatgactgtaaaggagtaattcagaaggtacgcacttaaactccccacatatcttaaaagggtactcagtgaaataatctttccaatcaaaagtttacaactcaatttctaagattattatgattttgaggcattttattttaaaggattataaaagggttaagaggttcactttgtttaaagccagttgatagatgacacgtgcagaaggacaggagctagagtagagtcataccatttccttctcatttatcttcttagctttcggattgtattttatcattctcaaagatgagggttttagaaagatagccgtcttacatttattggaaataataaaagtaatatattggtctttaaacagaccaaattgggcagtaacaatttcagtttaatttcattgacaaaatggtttatgaaatcacagcccacttcccccagttagacttaacttccttatggcatgttaagcaattttatgagttctctaggattccagttcccaatctagacttctcatcactgattttaacttaaggtaatttaaaagggatgtaatgagttaaataaattctagtacacatgtgcacttatattctgtatttagatgtgtataaacagaatccctaattgggaaaatcccttcaaatttgaatgtaatcagattatatactacttactagtattgtaatttgagtgtttccatttcttttacttgaaggccaagataaattgcagaagttgagagcatttataagaattgagtctccttttcctctactgtttcttctccctgaactcctcagaagatactttgttatcaccacataaatagaaagttcggtctttctaaggaaatggaaagatcaatcttaccaaggaaagatgttttcagtggcacgttggagccagcctcctactgactcatgagtgtcatcttaaatttgcaggaattttataaaaattccagttgatgttacattgttattttgaaatcagccacagtgggcatatcacaccacgtaattcagcgaactgtacaaatcttggatcttttctaccctcaccacaatcagttgtttatttaccagcacatggctggatattttcttcatgtatatgttcatgtatgtcatatatgtatatatatttgaatatattttcttcatatatgtattcatatacatgcatcacttccaaaatgagacattctcttgaactggatatatgtgattagcatccataagaatgagagattctgcatatgtgagagcagagcgggggcagtgctttccaccacttccttatagagcatgttggtgggaagctaagtgggagcacccagaaggaatgtaagtgccaatctcgagtctggtctgtgactttgagctggagacctattctctttcagcttcatttgggtttaacaaaataatctctaagatatgttcaactcttaatctgttattctggtgctatacttaagaatattttgatgaagtgtgatcagactctctttccagggacggattaatcaagtctttttcctctgctctaattaggaaatgcctgagacttcctctgctgcattaagtaataatgagcccagacacttaacacttctacttcttcattactcatctgtaggacatagaaaatgcagcaggtggtattgtacaactcaggctccgaaatatcctgcttgtttgtttttttttctaccatggtatacatctctacatattctacctggtgtaggaaattgtctgaaaacatctttagaagcagcaaaaaaaaaaaaaaaaaaaaaaaaaaggagtgcccacagcacatttatatttgagagcactgacatctgctttatcacccttgtcagtcccaaatccagcaagggttgaatctaaaaactgtcagtttggctgacagtaggtgtgagtgacagcacatgcagctgaaagtgggcatgtaattttacagtttacttattgtgtgggtaatgttgataatatttctgtagctcatttcattcttaacactcagagtccttttgtataaaaacgttaagtttattttatagattaaagccaacatcttgattttggtctaggaaaacctaagagataaactggagtagatttaaacagagagagagaagagttattctgtgcaatcataaaagttaagtgattgcatttcatttctaaaatgtccacctaactgtggtttccatgctgccatgggctgcagcttgatgcagcacttttatactttgcatatagattagtctaagcaataatttattatctttcttatagtgaagggtttggtggggttttttggaaggggctttatttggaggttgaaaagactcttacagttcaaataatagagctttctcatctgtaagcataatagaatgacgtgtagccatcagaaattcttacttgtaatgataagtacctgggataaagtgaatgtaagatgtatctatagatttgataaaaacaacaacaacacctgtagctataatgattcaaaataccctcactacttccagagttgttaactagtattcaagactgatttggatttttgccttttttccttccatagggtagcttttaatagcaaaatcaccagaaggcagagagaagagaaaactcaagagccctgaaataatctccaaacttaattaccaattctaaataattaagagttaactatagtatacttcatccatcatgaggaaataattagcaggaattaaaacttgagcactattttgttcttcttacctttttcacttatgcttggaaataatatagatggaatattcagaagctattagaaaggagaaattaatgtagagggagagtatatcagaatgttagttaattggtcaccaagggactaggaaaataatgaaaaagatgagaagaaaataatattctctctatttatccacagagtaacttcttacagaacttcctctctctagcattgccaaaaggaggaaataaacatctaagtaatctgactattctttggttgaagttactcctgaatatatcatctggagaagatgggcaacaaatgattctgaggcttgatggctgtctagacttactaacagagatgagcaaatacaagcacaagagcagccctttattgcctcttcttatctttcataatgtttgcttcagtcctgcaaataaacccaagatcctggctaatggtaagttttcacacacacatacatttatatatgtagttattcatagactgttcaggtcaacaccaaataattttataaataattttctaggcatttattaagcacccactgtgttcaaagcactgtggaaggcatgggaatgaatcaggcatggcttcagccttccgtgggcttccaggagtctcctgaggttagcaaatcatgtcattccagtgcacatactggacacctggaggaaggggagccgtggacgagggctccctggccttaccttctgctccctctcctctctccttgctcttcctctaactccagctcccctcttctgcatcttcaagcaaatgctactatgtcaatgaagcctctcgggaaccatgtgttaatataatagccccgcacccagggggccttctctttcctcctcctcactatttcctttcctggttttgtttccctccgtagtattatcgccatctgatagattatgtgtttcatgtatctgtctattcctagtcttcccacactagaaggtaagctcttatggggtcaggaggcttttgtctgctttgtttatgtgtagcacctagaattgtgcctgcaactagcgagcactcaataaatatttgatgattgagagagatcccaagcagaccggagagagttcagggcttgagatcagatggtgcagtgagcctcgcagagacttcattctctgagatgtaggacagatggaggcgaggattggtaaggattcagaaaaaaattgaagcaaaaagaatcggaaagatctttttctgcaaccatgtgttatctctgtgaggagtatgtgaatttcgtggggagtgagttttataaaagacatgtgttctagtgaaaaacagaaggtgggctccagacccctacacacctggtcttgaatgccagcactagggcatcactccagcgtcgcctggtgcagcctcgctgggcccagcttcttcatctataaaagaagcccactcttcttggtttggtaagaatcagtttataaacacacataaagtgcctagcgctatttctggtacatgataaatgtttaagatagattcattctcttgtttttttcatgtttttcacttaaacttttctcagaagcatttttctgtgaaatcaagggttttctaagtgtacgaaaatgattcttcttatattttgtggtgtatatagttgtgattctatttttctgataagcattctgataatcaactgctagatatgatatagaaggatgtttaaagttcagttagcttgtagcagacctaaccttactgtggattttgcactctgccttccggtggctgctgtgctgatgctgcgttctctgttgctgcgtgatgtacatcactggttttatttccatcctctcccactgtagctgcttcagccctcacatttgtaaaatgagggtgatgataatccctcctcagggcaatgagagagcctgtgaagtgtttgtgaccattcttggtatatagcagctactcagtaacatctgttattgtttattcacctttcttagaatgattttttttttctttgagggctacttactccagtttattattgagagttggaaaaaggtcaagctttttgagaagtgaaggagagaagtctgcattttccacttctagacccctctagaattatttttagcatttctttgtagtcagcaatgctttttctccttcattagcttaaagcagatggataaactttggtgagaagcttcccctagcccacagactagagatcagtgggcttttcaggcaggggtaagataagagacatcagctgtgcagtttctgtgtggaactataaagggatgtcacagcctatgcctcgctttccacttggggatttatggaggaggccttagcagagtcagccagcttaaaagtctcccaggaaaggctgcctctgatcggtagcacccacacatctggtttaaatggtcaggagtggagtgtgcagtggagcttgaccttgctggtaaaaatagatctggggcttggcatggtggctcacaactgtaatcccagtactttgggagaccgtggtgggtggatcatttgaggtcaagagtttgagatcagtctggccaacatggtgaaaccccgcctctactaaaaatacaaaaattagccaggcatggtggcgggcaccttgtagtccccagtagtagaattgcttgaactggggagacggaggttgcagtgagccaagatcgcgccactgcactccagcctgggcaacagagtgagacttcatctccaaaaaaaaaaaaagatctggaacattccttgtttctggcaatgccagactaagtctcttctgaaaacgacaataacatgctagacaggctgtattaaaatgcacctcaaaataatcacaaaaactgaaaagatagaaactcccagtccagttttgattgaaagtcttgcccagacaagtaagaagtatatagaaaattattttgccccaagtgcatttgccaaggttgtatgcttggcttttgttgaggagtatcgaggggtgagaggacagaagccgcgattccccaaagtggggattcttactggctatcctgcttgtattaagctggacctccaaagaaccattctcttaatagatggatgggtcaaaaataagttggtttcccaaacttcatgaaggagactgtaaagaaaaggaaaaaaaaaatgtgagaatgggtactacagactgcttctgatagggctctgcacccaaagttggccgtgaacttggcttgaggtgtcttcgattgatggtgcctgtgggtacttagcagaaagcaaactgccttggtgatggatgaaagacaagttcatactgggcctcagggaacctctacaaataatttttcaaaagcattaaccagtacaaagttagagataatcaagcacattaggagacatggcaacatgtagtaagaaacagcagaagaataaaaataccagcttatctgcccagactttgaatatgggaattacaaagcatgggtttaaaaataactttaattataccatatttagataaataaatgacaagcttgaaaattttaggaaatgggaaactgacaagttgaaatatttgaaaagaaccaaacagaacttcaagaactttactgtgcagtatgataatcagccacatgtagctatttaaatttaaactaattaaaattattcagttgtactcactacatgtggctagtggctatcttattaaatagcaagatataaatatttccattattgtaggaagttctgttttacaacagtaatctagaacttcagtggccaaaattgaaaacttaatatacatgtctgacagcaagttaggtatagcagagaacttaggaattagaagatagattagaaaaatattatccagaatgcagcagagaaagctaaaaagatgagaaaggatcaaaagaatcaaaggtaagtgacacagcagatatatcaagacagtctttgtgtttaatgaagtgtcctaggagaatgggagaggaaatatttgaagaaatgatgggtaaaaactttaagaacttttctaagacattaatgtcaccataactgacaactcactgtaattaccaaactgacatccctaaacttatacttaaaccaattgtattaagaaggtaatattcaattattatattaaggtaacattcaattattatattaaggtaatattcagttcaaatattcaaaaatactgtctcattatttacattttactactgtatattcactttaggttatttaaatgtttatatgagagttcagacctacttgttgaactcaaaattgttttattgctttgttatatgcatgtttcacaataacatttgttttgttaaaaaagtcgatccacttgcattatcagaggggcccaccacattaattcacacacacacacacacacacagacacacacacacacacacatatgtatatatacatacacacacagtactttattaaaaatgctttaagggatagctggttgaaggagttataaacttacttagatcagaggagttatatattctgagtgtttgagacaacatttaaaaacatcacttgatgctactcagatggaacataaggaagtcaccctcccatttaataaggggacatttgatgtgccctaatgagtagcacttgcagccataacctcacgtgataaattgcatctgcaagctatgtacatggcttggttctgggtaggttatgatacacgacaaccaaagggcatcagatagtgcagatgaggtgttcagggagtcggctgcagcgtgcccgaaacatcactgcacctgcctttcacattgtcctgatgcacatttccagttcactttagggagcagctttttttgttttgtttttgttaaatatttaaaatcccttaaaataaaaaaattgaattatgtagacaaaatttttgtttattctattctggaatctttcacacaacgaatatttattgagctcctaaaatacactagcattgtggttggtctaataccagtgagtagacactgccatctaactaataccagtgagcagacgttgccctgtaactaataccagtgagcagacactgccttctaaccagtaccagtgagcagacgctgccctgtaactaataccagtgagcagacgctgccctctaaccagtaccagtgagcagacactgtgctgtaactaataccagtgagcagatgctgccctctaaccaataccagtgagcagacgctgccctctaaccaataccagtgagcagacgctgccctctatctaacaccagtgagcagacgctgccctgtaaccaataccagtgagcagacactgccctgtaaccaataccagtgagcagatgctgccctgtaaccaataccagtgagcagacgctgccctctaaccaataccaggagcagacgctgccctctatctaacaccagtgagcagacgctgccctctaaccaataccagtgagcagacactgccttctaaccagtaccagtgagcagacgctgccctgtaactaataccagtgagcagatgctgccctctaaccagtaccagtgaacagacactgtgctgtaactaataccagtgagcagatgctgccctctaaccaataccagtgagcagaccctgccctctaaccaataccagtgagcagacgctgccctctgtctaacaccagtgagcagacgctgccctgtaaccaataccagtgagcagatgctgccctgtaaccaataccagtgagcagacgctgccctgtaaccaataccagtgagcagacgctgccctgtaaccaataccagtgagcagacgctgccctctaaccaataccagtgagcagacgctgccctgtaaccaataccagtgagcagacgctgccttctaaccaataccaggagcagacgctaccctctatctaacaccagtgagcagacgctgccctctaaccaataccagtgagcagacactgccctctaaccagtaccagtgagcagatgctacactcacagaccctgccttgaaccttttcctattttagtacccttatttatttatcttgcctgattgccctggccagaagttccaatactgtgttgaacaggagtggtaagaaatggcatccttgtcttgtgccagttttcaaagggaatgtttccagcttttgcccattcagtgtgatattggctgtgggtttgtcataaatagctcttattattttgagatatgttgcatcaatacctagtttattgagagtttttagcatgaaagggtgttgaatttttttgaaggcctttctgcatctgttgagataatcatgtggtttttgtcgttggctctgtttatgtgatagattacttttattgatttgtgtatgttgaaccagccttgcatcccagggatgaaacggacttgatcttggtgaataagctttttgacgtgctgctggattcagtttgccagtattttattgaggatttttgcatcgatgttcatcggggatattggcctgaaatttcctttttttgtgtgtgtctctgccaggtttttgtatcaggatgatgctggcctcataaaatgagttagagaggattccctctttttctattgattggaatagtttcagaaggaatggtaccagctccactttgtatgcctggtagaattcggctgtgaattcatctggtcccgggctttttttggttggtaggctattaattactgcctcaatttcagaacttgttattgatctattcagggattcgacttcttcctagtttagtcttgggagggtgtatgtgtccaggaattcatccatttcttctagattttctagtttatttgcatagaggtgtttataatattctctgatggtagtttggatttctgtgggatcagtgctgatctcccctttatcattttttattgtgtctatttgattcttctctcttttcttctttattagtcaggctagtggtctatctattttgttaatcttttccaaaaaccagctccgggattcattgattttttgaagggtttttcgtgtctctctctccttcagttctgctctgatcttagttatttcttgtcttctgtaagcttttgaatttgtttgctgttgcttctctagttcttttaattgtgatgttagggtgttgattttagatctttccccctttcacctgtgagcattttgtgctataaatttccctctaaacactgctttagctgtgtcccagagattctggtatattgtgtctttgctctctttggtttcaaagaactaatttatttctgccttaattgtgttatttactcagtagtcattcaggagcaagttgttcagtttccatgtagttgtgtggttttgagtgagtttcttaatcctgagttctaatttgattgcattgtgctgtgagagactgtttgttatgatttcaggtctttggcatttgctgaggagtgttttacttccaagtatgtggtcagttttagaataagtgcgatgtggtgctgagaagaatgtatactctgttgatttggggtggagtgttctgtagatgtctgttaggtccacttggctcagagttgagttcaagtcctgaatatccttgttaattttctgtcttgttgatgtgtctaatattgacagtggggtgttgaagtctcccatgattattgtgtgcgagtctaagtctctttgtaggtctctaagaacttgctttatgaatctgggtgctcctgtattgggtgcatatatatttaggatagttagttctatttgttgcattgatccctttatcattatgtaatgcccttctttttcttttttgatctttgttggtttaaagtcttttttatcagaggctaagattgccacctctgctttttttttctcccctgcttgccatttgcttagtaaatcttcctccatccctttattttgagcctatgtgtgtctttgcacgagatgggtctcctgaatacagcacaccgatgggtcttgacgcttcatccaatttgccagtctgtgtcttttaattgtggcatttagcccgtttacatttaaggttaatattgttacatgtgaatttgatcctgtcattatgatgctagctggttgttttgcccattagttgatgcagtttcttcatagtgtcaatgttctttacaatttgatatgtttttgcagtggctggtacaggtttttcctttccatatttagtgcttccttcaggagctcttgtaaggtagggctgctggtgacaaaatctctcagcatttgcttttctgtaaaggattttatttatttttcacttatgaagcttagtatggctggatatgaatttctgggttgaaaattattttcttgggccatacgcagtggctctcacctgtaatcccagccttttgggaggccaaggtgggcggaccatgagatccagagtctgagaccagcctggcccatatggtaaaaccccgtctctaataaaaatacaaaaaaattagccaggtgtggtggtgcccacctgtcgtcccagctactcaggaggccgagacagaagaattgcttaaacctggtaggcggaggttgcagtgagccgagatctcaccactgcactccaaacctgggagacagagcaagactgcatccccctccccaacaaaaaaagaaaagataaattctttaagaatgttgaatattggcccccagtctcttttggcttataggatttctgcagagagatctgctgttagcctgatgggcttcccttggtgggtaacccgacctttctctctggctgcccttaacattttttccttcatttcaaccttggtgaatctgatgattatgtgtcttggggttgctcttctcgaggagtatctttgtggtgttctctgtatttcctgaatttgaatgttggcctgtcttgctaggttggggaagttctcttgcatttaatatcctgaagagtattttccaacttggttccatttttccccatcactctcaggtacaccagtcaaacataggttgcttcttttcacacagtcccatatttcttggatgctttgttcattccttttcttttttttttttctctaatcttgtcttcacgctttatttcgttaagttgatcttcaatctctgacatcctttcttctgcttgatcgatttcgctattgatacttgtgtatgcttcacgaagttctcatgctatgtttttcagctcccatcaggtcatttatgttcttctttaaactggttattctagttagcatttcctgtaaccttttatcaaggttcttagcttccttgcattgggttagaacatgcttctttagcttggaggagtttgttattacccaccttctgaagcctgcttctgtcacttcgtcaaactcattctccatccaattttgttcccttgctggtgaggagttgtgatcctttggaagagaagagttattctggttttgggaattttcatcctttttgcactgggttttcctcattttcgtggatttatctacctttggtttttgatgttggtgaccattggatggggtttttgtgtggatgtccttttggttgatgttgatgctattcctttctgtttgttagttttcttcctaacgggcctctctgctgcaggtctttgggagttggctggaggtccactcctgcccctgtttgcctgggtatcaccagcagaggctacagaagagcaaagattgctgcctgctccttcctctggaagcttcatcccagagggcaccccccagatgccagctagagctctcctgtatgatgtgtctgtcaacacctgttgggaggtgtctcccagtcaggaggcacgagcgtcagggacccacttgaggaggcagtctgtccgttagcagagctcgagcactgtgctgggaggtccactgctctcttcagagacagcaggcaggaacatttaagtctgctgaagctgcacccacagccgccctttcccccaggtgctctgtcccagggagatgggagttttatctataagcccctgactgggcctgctgcctttctttcagagatggcctgcccagagaggaggaatctagagaggcagtttgggtacaacgtctttgctgagctgtggtgggctctgcccagtttgaacttcccagtgccttcgtttgcactgtgaagggaaacaggctacttaagcctcattaatggtggacacccctctccccaccaagctcgagcatcccaggtcgacttcagactgctgtgcaggcagtgagaattttaagccagtggatcttagtttgctgggctccatgggtatgggatctgttgagctaggccacttggcaccctggcttcagccccctttccaggggactgaacaactctgtctcactggcattccaggcactactgaggtatgaaaaatctcctgcagctggctcggtgactgcccaaatggctgcccagctttgtgcttgaaaccctgggccctggtggtgtaggcacccaagggaatctcctggtctgtgggttgcaaagaccatgggaaaagcgtagtatctgggccggaatgcaccgttcctcagggcacagtttctcagagcttcccttggctaagggagggagctcccccaccccttgtgattcctgggtgaggcgacaccccaccctgctttggctcgccctccatgggctgcacccgttgtctaaccagctccagtgagatgagctgggtacctcagttggaaatgcagaaatcacccgccttctgcattgatctcactggaagctgcagaccggagcttcctattgagccatcttgccagccaccctagtcatttttaaaaaacatcaagcagtgtgatatttgatgatcgtttttgtatagtagctcatgctactgatgtgtttgtatgatagtctttataatttatcatgaaagcagatctgtttttctgcctgccagaatgttagctgtaattgagtaactcattaatgtacctaattgtatacttatttttacacacttgtggtctttaaatgaatgtgccttttcttgaattctggccaaaaaatgaagcagcttcagtgtctttgacccttctatgcctgacatgaaaacaatgttttgaggttgtcctcccatataccacatggcataaaagattggttttgccatagtctagtgataccaactttatgtatgcattctaatgggaaaagaggggggtgtctgactagtccaagataagaatacaatgcagtgtctgggactgaacttttaaaaaatatatgttcatttttagaaaaagtcattactgtgcttgctgcctgtctggaaagtgagaatcaaaatgctcagaggattggagcagctgccctttgggctctgatttacaattatcagaaggtcagttttaaaaatcattgttacacctggggagcaaacaacaaggtataacccaggtataaactcttaggatacatccaaaggtgtcaagagttacagcaaaagaaaaaagacaaaatcaaagatccatgttccctttgctgattcatacaattagtaaaccatcagttgaaatctttttatttaatcatttcaacagaatgtctcagtttagaagagaatctctgaactgactttttcctcttaatttaaattgatttactttattattgcaattttagtatagattgtttcttctaaaagacgtatcaagggaaaacacatcttaaagtaaaactgagtaacaaaagttttatccaattgtacaattcccctttatctagctcagttcttgtacgactgcagcccaaagcctgctctgagaaaagggcaggcaacgtggagatttgtgttctactctttctctggcctttggacttccactttattgcagacatgttgttcccaagagaaatacccataagtatctagtgattaagtagtagccaagtgacagtgttaggatagacagccatcctagaatggtgttctctcagctgactgtctctgccggggctagttttctccctgctggccagagtcacgtacacaaggacaagagggtgttgttttctttctcacctgggtatccccagagcttagcacaggatttggcactttgtagtcactctgtaaatatttgttgaccaactgctaatatttggtatatgtgatcagaaatctgaggtttgagggagtatgaaaaactgaaaccaaggatgactagtttaaaatagcaaattgagattaggggagaaggagtaaaagagaagggaagaaagaaaatgggaatagagaaagaatcaagttagataagaggatatgggcaagacttcagaatgtgcaaggggattggctcaataggatgtattatgctaagatggaactctctagttatattattatatttcataatattctgtttaatactgtagttagcaatgggcagaattagtgttttgctatcatgatccataacacatggcaagaaacctaattaatggattgttctaggcaaaaacagctttgaaaagcccatcagtaaaaagaagagtggatgaagcatactccttagcaaagaaaagtaagttgcaataagaaagagattatagttaaactcagaagctattaagtggattttctgattaatgagatatttggacaggccacagcaaaatggcattgtaaaatgtgccaatattcagtatgtgctttaattatatcattttttaaaataataaaatagatagatgaaggtttaagatgtgattgcttctaaaaatgcatctgtgatcttcgtcttatttttgtactaaattttctttgccaacagtgaccactgtgctgaagtatgttcttagtgataagaactggcccaattagaattaactgtgagcagaaaacctggatctaacatcagggagctggaggacagtcttccaagaattgatcctgttacccttatatccacgtttccctgtgatgtggtcacaatactagagacggttttcttttcaaagcacattattcatttttagtgacaccaaatttcagtgagcgttattctctgaacattttttatgctaaaacactgaattgtgtctttcctgtactgtaatatatctgttggttatttgtgtttttatagtctgatttttttttttaagcaggggaggttttagtttgttttagctgcgaccatgaatttctggagctagtgaagttaaagattatgctttaggaaggatggtacataaaaaaagattaatggcattcatttggaattatagttaatggtatccattatggggggtactttttaaaaaatactctgggtaagctgttaatttaaaaaaatattgattttgtaacttgtttattttttaaaaaatgcaaaatattctggaatgctattacatcaagaacttagagctttaaattatatataaatcctgttcatatgtatttgtttatgtgtgtgcctcctaagtatagtaccaagtttcataaactagtatttctgtactcttatttttctatctcagctttcccaaactcagaagcaaaccctctaaatgcctattatttgaaatgtcttgaaaacctcgtgcagctccttaattcttcctgagtgccatgggatgctacaccttgaagctgacagtcatcaacaggggagctaaagttgaagccagctgtgtgtagcagctgttacctgaagacgtgctacctctctacaaagtgttgatccccttctttcccatgagagagagaactggtgatactccaacaccgtccagttgtggcagctctccagaagtaatagcagctgacaactttctgtgccttttcctttctgttgaaaaggcatagaaagttctgggaacataaacatttttacccttttctatgccatttattttgtaaaaatcctatttaacagttatttaataaaacaatatttttagaaactaaaaattgactaataattgctgcttacagacttttatcagtctcatgaatattaattttaggagttgaaataagacactgtgtcctggttgtttctctctttttttaaattttaactgatgtaaaatttggctctgtcagtgcaaatccttattttcaaaactttctgttatccagagcatccacactggaaaagggctatgtagaagtaagtgtgcattatttgtaaagggctgtgtggaagtaaatgtacatgatttgtaagtagctttcttaggcaagttttagtgatgttatcttcttcctagatgactcttaaatcattacatgtataatcttcaccgttgtcttctgcaaggctgtgtaataaagaagaaagaaatagagttggggctgtataagcctgggttcaaatttagctcagcccaaaacatcatgaagaatagagtaagactgaaaaatgcagaagatggccgggcttggtggctcatgcttatactttcagctctttgggagaccgaggtaggtggatcacttgaggccaggagtttgagaccagcttgggcaacttggtgaaatcccatctctcctaaaaatacaaaaattagccattcctggtcttgagcgtctataatctcagctactccagtggctgaggcacgagaatctcttcaacctgggaggcagggaggttgcagtgagctgagatcatgccactgcattccagcgtgggtgacaa

SEQ ID NO: 13844 - DNA, 2333 bp, Homo sapiens
aggggtagtttagatagaaatggagagaggggaatgtgtccccagaaggagaaaggaggaaattgatgacagttctcctgttcagcagttttacaaggacccattttaataagtgctatgaagggaaatcctccaaagatatcctgaaaagagtagctgcaaatgcattgatgtcactgctggctgtcagtagaagagcacagaaacatgctttgaaagccaatcttatagacaattgcatggagcagatgaaacacataaatgcacaactgaacctagattctctgaggcctgggaaagcagcattgaaaaaaaaggaggatggtgttattaaagagttaagcattgccatgcagctcctaagaaactgtctttatcaaaatgaggaatgtaaagaagcagctcttgaagctcaccttgtccctgtcttgcactctctctggccttggattttgatggatgattcattgatgcaaatttctctgcagctcctttgtgtctatactgcaaattttccaaatggttgcagttctctttgttggtcaagttgtggacaacaccctgttcaagctacacatagaggagccgtgagcaactctctgatgctgtgtatcctaaagttggcttcccagatgccactggagaacaccacggttcagcagatggtttttatgcttctttcaaacctggccttgtcgcatgactgtaaaggagtaattcagaagagtaacttcttacagaacttcctctctctagcattgccaaaaggaggaaataaacatctaagtaatctgactattctttggttgaagttactcctgaatatatcatctggagaagatgggcaacaaatgattctgaggcttgatggctgtctagacttactaacagagatgagcaaatacaagcacaagagcagccctttattgcctcttcttatctttcataatgtttgcttcagtcctgcaaataaacccaagatcctggctaatgaaaaagtcattactgtgcttgctgcctgtctggaaagtgagaatcaaaatgctcagaggattggagcagctgccctttgggctctgatttacaattatcagaaggcaaaaacagctttgaaaagcccatcagtaaaaagaagagtggatgaagcatactccttagcaaagaaaactttcccaaactcagaagcaaaccctctaaatgcctattatttgaaatgtcttgaaaacctcgtgcagctccttaattcttcctgagtgccatgggatgctacaccttgaagctgacagtcatcaacaggggagctaaagttgaagccagctgtgtgtagcagctgttacctgaagacgtgctacctctctacaaagtgttgatccccttctttcccatgagagagagaactggtgatactccaacaccgtccagttgtggcagctctccagaagtaatagcagctgacaactttctgtgccttttcctttctgttgaaaaggcatagaaagttctgggaacataaacatttttacccttttctatgccatttattttgtaaaaatcctatttaacagttatttaataaaacaatatttttagaaactaaaaattgactaataattgctgcttacagacttttatcagtctcatgaatattaattttaggagttgaaataagacactgtgtcctggttgtttctctctttttttaaattttaactgatgtaaaatttggctctgtcagtgcaaatccttattttcaaaactttctgttatccagagcatccacactggaaaagggctatgtagaagtaagtgtgcattatttgtaaagggctgtgtggaagtaaatgtacatgatttgtaagtagctttcttaggcaagttttagtgatgttatcttcttcctagatgactcttaaatcattacatgtataatcttcaccgttgtcttctgcaaggctgtgtaataaagaagaaagaaatagagttggggctgtataagcctgggttcaaatttagctcagcccaaaacatcatgaagaatagagtaagactgaaaaatgcagaagatggccgggcttggtggctcatgcttatactttcagctctttgggagaccgaggtaggtggatcacttgaggccaggagtttgagaccagcttgggcaacttggtgaaatcccatctctcctaaaaatacaaaaattagccattcctggtcttgagcgtctataatctcagctactccagtggctgaggcacgagaatctcttcaacctgggaggcagggaggttgcagtgagctgagatcatgccactgcattccagcgtgggtgacaa

SEQ ID NO: 13845 - DNA, 2284 bp, Homo sapiens
tccttttcctctactgtttcttctccctgaactcctcagaagatactttgttatcaccacataaatagaaagttcggtctttctaaggaaatggaaagatcaatcttaccaaggaaagatgttttcagtggcacgttggagccagcctcctactgactcatgagtgtcatcttaaatttgcaggaattttataaaaattccagttgatgttacattgttattttgaaatcagccacagtgggcatatcacaccacgtaattcagcgaactgtacaaatcttggatcttttctaccctcaccacaatcagttgtttatttaccagcacatggctggatattttcttcatgtatatgttcatgtatgtcatatatgtatatatatttgaatatattttcttcatatatgtattcatatacatgcatcacttccaaaatgagacattctcttgaactggatatatgtgattagcatccataagaatgagagattctgcatatgtgagagcagagcgggggcagtgctttccaccacttccttatagagcatgttggtgggaagctaagtgggagcacccagaaggaatgtaagtgccaatctcgagtctggtctgtgactttgagctggagacctattctctttcagcttcatttgggtttaacaaaataatctctaagatatgttcaactcttaatctgttattctggtgctatacttaagaatattttgatgaagtgtgatcagactctctttccagggacggattaatcaagtctttttcctctgctctaattaggaaatgcctgagacttcctctgctgcattaagtaataatgagcccagacacttaacacttctacttcttcattactcatctgtaggacatagaaaatgcagcaggtggtattgtacaactcaggctccgaaatatcctgcttgtttgtttttttttctaccatggtatacatctctacatattctacctggtgtaggaaattgtctgaaaacatctttagaagcagcaaaaaaaaaaaaaaaaaaaaaaaaaaggagtgcccacagcacatttatatttgagagcactgacatctgctttatcacccttgtcagtcccaaatccagcaagggttgaatctaaaaactgtcagtttggctgacagtaggtgtgagtgacagcacatgcagctgaaagtgggcatgtaattttacagtttacttattgtgtgggtaatgttgataatatttctgtagctcatttcattcttaacactcagagtccttttgtataaaaacgttaagtttattttatagattaaagccaacatcttgattttggtctaggaaaacctaagagataaactggagtagatttaaacagagagagagaagagttattctgtgcaatcataaaagttaagtgattgcatttcatttctaaaatgtccacctaactgtggtttccatgctgccatgggctgcagcttgatgcagcacttttatactttgcatatagattagtctaagcaataatttattatctttcttatagtgaagggtttggtggggttttttggaaggggctttatttggaggttgaaaagactcttacagttcaaataatagagctttctcatctgtaagcataatagaatgacgtgtagccatcagaaattcttacttgtaatgataagtacctgggataaagtgaatgtaagatgtatctatagatttgataaaaacaacaacaacacctgtagctataatgattcaaaataccctcactacttccagagttgttaactagtattcaagactgatttggatttttgccttttttccttccatagggtagcttttaatagcaaaatcaccagaaggcagagagaagagaaaactcaagagccctgaaataatctccaaacttaattaccaattctaaataattaagagttaactatagtatacttcatccatcatgaggaaataattagcaggaattaaaacttgagcactattttgttcttcttacctttttcacttatgcttggaaataatatagatggaatattcagaagctattagaaaggagaaattaatgtagagggagagtatatcagaatgttagttaattggtcaccaagggactaggaaaataatgaaaaagatgagaagaaaataatattctctctatttatccacagagtaacttcttacagaacttcctctctctagcattgccaaaaggaggaaataaacatctaagtaatctgactattctttggttg

SEQ ID NO: 13846 - DNA, 669 bp, Homo sapiens
tccttttcctctactgtttcttctccctgaactcctcagaagatactttgttatcaccacataaatagaaagttcggtctttctaaggaaatggaaagatcaatcttaccaaggaaagatgttttcagtggcacgttggagccagcctcctactgactcatgagtgtcatcttaaatttgcaggaattttataaaaattccagttgatgttacattgttattttgaaatcagccacagtgggcatatcacaccacgtaattcagcgaactgtacaaatcttggatcttttctaccctcaccacaatcagttgtttatttaccagcacatggctggatattttcttcatgtatatgttcatgtatgtcatatatgtatatatatttgaatatattttcttcatatatgtattcatatacatgcatcacttccaaaatgagacattctcttgaactggatatatgtgattagcatccataagaatgagagattctgcatatgtgagagcagagcgggggcagtgctttccaccacttccttatagagcatgttggtgggaagctaagtgggagcacccagaaggaatagtaacttcttacagaacttcctctctctagcattgccaaaaggaggaaataaacatctaagtaatctgactattctttggttg

SEQ ID NO: 13847 - DNA, 3079 bp, Homo sapiens
actgcgtttccgggatggagctcacactctcctctcacaaagcctctagatatctgtgtgaagtacttgtcaggtctccttgaggtcattacttctttttatgtggagcgtggaggaaatgctatgtccttcatgggaaaaggtgttacaaagagcacaattctttgcttgcttcacttatcccatgagatgatggcccaggctgggagcttggagtggatgtcactttggttcttgcctttgggtagtcatagtgaagaacatattcctactcaacaaggattggcttggttgattccattatgggttgatcgggacccagaggtgagattcacttcactgggattaggatcagcactgaccacccttgaaacgggctgtgtggccttagcaaacagttgtcagaacatttccggtgggctctggggaactgtggtgaacattcttctggaccagtcagaatgtagtatggtgcgccgggaggcggcatttattcttcagaatctccttgtaattccaatgcctacagaaattataaaggattatacttggcagggtccctgtgttcatgatgaggactctggcctatcgctcattggaaaacctgcccttcaggctcttttatatcactgccatttttatgaacatttgaatcagatggtaaagcattgttacctaggacggtgtatgtttgatttgaatttttctgcttttgatagaaattcagaaagcaatgatttaaatggtttagatgactcattcaagttttggagggctccatctaggacaagtcaggatcgagatccaagttctctctccacctcagaaacaacggtcaccaggaaagtacatcaccacggccacctcatgattcatctctttctgctcccctgcccaaactgtgtgtttttgttactccatctcttctttcagcaatgtgcagcctcttggacaacctcttgacgattgctcccagagacactgcaaaggcttttcgacaagctcatctcatagaacttctctgtagcattgcagatgctaccctcatacagacatgtgtccaggaactcagagccctgctgccttcatcacctccagctgaacacactcaggctcaggtttcctttctcctggaatacctatcctctttgtccaggcttctgcagtcatgtttattggtggagcctgaccttgtgattcaggatgagcttgtgaaacctcttatcaccaatatcattggaattctcaccatatgtaccaaagatgtattagataaagagttaatatcagctttttatcacacatggacacatttatttaatcttctggccatgctcctgaggaaagctggtgccatcacactcccgtttgttaccgtggccctggccaagcactggacagcggcgattgatatgttctgcacatgtgcaggcttgtctgccacgtgtcctgccctgtatactgccagcttgcaattcctttctgttctcttgaccgaagaagcaaaagggcatctccaggctaagagcaaaacacatttatgctgtagtccaacagtggcttcacttcttgatgactctcaggaaaatcagaaatctctagaacaacttagtgatgtaatccttcagtgctatgaagggaaatcctccaaagatatcctgaaaagagtagctgcaaatgcattgatgtcactgctggctgtcagtagaagagcacagaaacatgctttgaaagccaatcttatagacaattgcatggagcagatgaaacacataaatgcacaactgaacctagattctctgaggcctgggaaagcagcattgaaaaaaaaggaggatggtgttattaaagagttaagcattgccatgcagctcctaagaaactgtctttatcaaaatgaggaatgtaaagaagcagctcttgaagctcaccttgtccctgtcttgcactctctctggccttggattttgatggatgattcattgatgcaaatttctctgcagctcctttgtgtctatactgcaaattttccaaatggttgcagttctctttgttggtcaagttgtggacaacaccctgttcaagctacacatagaggagccgtgagcaactctctgatgctgtgtatcctaaagttggcttcccagatgccactggagaacaccacggttcagcagatggtttttatgcttctttcaaacctggccttgtcgcatgactgtaaaggagtaattcagaagagtaacttcttacagaacttcctctctctagcattgccaaaaggaggaaataaacatctaagtaatctgactattctttggttgaagttactcctgaatatatcatctggagaagatgggcaacaaatgattctgaggcttgatggctgtctagacttactaacagagatgagcaaatacaagcacaagagcagccctttattgcctcttcttatctttcataatgtttgcttcagtcctgcaaataaacccaagatcctggctaatgaaaaagtcattactgtgcttgctgcctgtctggaaagtgagaatcaaaatgctcagaggattggagcagctgccctttgggctctgatttacaattatcagaaggcaaaaacagctttgaaaagcccatcagtaaaaagaagagtggatgaagcatactccttagcaaagaaaactttcccaaactcagaagcaaaccctctaaatgcctattatttgaaatgtcttgaaaacctcgtgcagctccttaattcttcctgagtgccatgggatgctacaccttgaagctgacagtcatcaacaggggagctaaagttgaagccagctgtgtgtagcagctgttacctgaagacgtgctacctctctacaaagtgttgatccccttctttcccatgagagagagaactggtgatactccaacaccgtccagttgtggcagctctccagaagtaatagcagctgacaactttctgtgccttttcctttctgttgaaaaggcatagaaagttctgggaacataaacatttttacccttttctatgccatttattttgtaaaaatcctatttaaca

SEQ ID NO: 13848 - DNA, 14686 bp, Homo sapiens
agacaagttatctcccatttctaaaattctgttcctttacacaggcctttatttagatgttttctttagcaactattaaaaaccctagtatgtttattttattctttttttaaaaataaacctggtgtcttaaagtgctttagtgagataattaggccctcagtgaggacagtatatctattaggttgactgtagacaccaacattagcctccattgctaatttgcagttcacaggttaatggcctagtcattttgttagacagatatgctttgccacttagtgtcttcaaaaactaaacagggaaactgagaagacattgtgataggctgttatttttgaaggttgcagttctctttgttggtcaagttgtggacaacaccctgttcaagctacacatagaggagccgtgagcaactctctgatgctgtgtatcctaaagttggcttcccagatgccactggagaacaccacggttcagcagatggtttttatgcttctttcaaacctggccttgtcgcatgactgtaaaggagtaattcagaaggtacgcacttaaactccccacatatcttaaaagggtactcagtgaaataatctttccaatcaaaagtttacaactcaatttctaagattattatgattttgaggcattttattttaaaggattataaaagggttaagaggttcactttgtttaaagccagttgatagatgacacgtgcagaaggacaggagctagagtagagtcataccatttccttctcatttatcttcttagctttcggattgtattttatcattctcaaagatgagggttttagaaagatagccgtcttacatttattggaaataataaaagtaatatattggtctttaaacagaccaaattgggcagtaacaatttcagtttaatttcattgacaaaatggtttatgaaatcacagcccacttcccccagttagacttaacttccttatggcatgttaagcaattttatgagttctctaggattccagttcccaatctagacttctcatcactgattttaacttaaggtaatttaaaagggatgtaatgagttaaataaattctagtacacatgtgcacttatattctgtatttagatgtgtataaacagaatccctaattgggaaaatcccttcaaatttgaatgtaatcagattatatactacttactagtattgtaatttgagtgtttccatttcttttacttgaaggccaagataaattgcagaagttgagagcatttataagaattgagtctccttttcctctactgtttcttctccctgaactcctcagaagatactttgttatcaccacataaatagaaagttcggtctttctaaggaaatggaaagatcaatcttaccaaggaaagatgttttcagtggcacgttggagccagcctcctactgactcatgagtgtcatcttaaatttgcaggaattttataaaaattccagttgatgttacattgttattttgaaatcagccacagtgggcatatcacaccacgtaattcagcgaactgtacaaatcttggatcttttctaccctcaccacaatcagttgtttatttaccagcacatggctggatattttcttcatgtatatgttcatgtatgtcatatatgtatatatatttgaatatattttcttcatatatgtattcatatacatgcatcacttccaaaatgagacattctcttgaactggatatatgtgattagcatccataagaatgagagattctgcatatgtgagagcagagcgggggcagtgctttccaccacttccttatagagcatgttggtgggaagctaagtgggagcacccagaaggaatgtaagtgccaatctcgagtctggtctgtgactttgagctggagacctattctctttcagcttcatttgggtttaacaaaataatctctaagatatgttcaactcttaatctgttattctggtgctatacttaagaatattttgatgaagtgtgatcagactctctttccagggacggattaatcaagtctttttcctctgctctaattaggaaatgcctgagacttcctctgctgcattaagtaataatgagcccagacacttaacacttctacttcttcattactcatctgtaggacatagaaaatgcagcaggtggtattgtacaactcaggctccgaaatatcctgcttgtttgtttttttttctaccatggtatacatctctacatattctacctggtgtaggaaattgtctgaaaacatctttagaagcagcaaaaaaaaaaaaaaaaaaaaaaaaaaggagtgcccacagcacatttatatttgagagcactgacatctgctttatcacccttgtcagtcccaaatccagcaagggttgaatctaaaaactgtcagtttggctgacagtaggtgtgagtgacagcacatgcagctgaaagtgggcatgtaattttacagtttacttattgtgtgggtaatgttgataatatttctgtagctcatttcattcttaacactcagagtccttttgtataaaaacgttaagtttattttatagattaaagccaacatcttgattttggtctaggaaaacctaagagataaactggagtagatttaaacagagagagagaagagttattctgtgcaatcataaaagttaagtgattgcatttcatttctaaaatgtccacctaactgtggtttccatgctgccatgggctgcagcttgatgcagcacttttatactttgcatatagattagtctaagcaataatttattatctttcttatagtgaagggtttggtggggttttttggaaggggctttatttggaggttgaaaagactcttacagttcaaataatagagctttctcatctgtaagcataatagaatgacgtgtagccatcagaaattcttacttgtaatgataagtacctgggataaagtgaatgtaagatgtatctatagatttgataaaaacaacaacaacacctgtagctataatgattcaaaataccctcactacttccagagttgttaactagtattcaagactgatttggatttttgccttttttccttccatagggtagcttttaatagcaaaatcaccagaaggcagagagaagagaaaactcaagagccctgaaataatctccaaacttaattaccaattctaaataattaagagttaactatagtatacttcatccatcatgaggaaataattagcaggaattaaaacttgagcactattttgttcttcttacctttttcacttatgcttggaaataatatagatggaatattcagaagctattagaaaggagaaattaatgtagagggagagtatatcagaatgttagttaattggtcaccaagggactaggaaaataatgaaaaagatgagaagaaaataatattctctctatttatccacagagtaacttcttacagaacttcctctctctagcattgccaaaaggaggaaataaacatctaagtaatctgactattctttggttgaagttactcctgaatatatcatctggagaagatgggcaacaaatgattctgaggcttgatggctgtctagacttactaacagagatgagcaaatacaagcacaagagcagccctttattgcctcttcttatctttcataatgtttgcttcagtcctgcaaataaacccaagatcctggctaatggtaagttttcacacacacatacatttatatatgtagttattcatagactgttcaggtcaacaccaaataattttataaataattttctaggcatttattaagcacccactgtgttcaaagcactgtggaaggcatgggaatgaatcaggcatggcttcagccttccgtgggcttccaggagtctcctgaggttagcaaatcatgtcattccagtgcacatactggacacctggaggaaggggagccgtggacgagggctccctggccttaccttctgctccctctcctctctccttgctcttcctctaactccagctcccctcttctgcatcttcaagcaaatgctactatgtcaatgaagcctctcgggaaccatgtgttaatataatagccccgcacccagggggccttctctttcctcctcctcactatttcctttcctggttttgtttccctccgtagtattatcgccatctgatagattatgtgtttcatgtatctgtctattcctagtcttcccacactagaaggtaagctcttatggggtcaggaggcttttgtctgctttgtttatgtgtagcacctagaattgtgcctgcaactagcgagcactcaataaatatttgatgattgagagagatcccaagcagaccggagagagttcagggcttgagatcagatggtgcagtgagcctcgcagagacttcattctctgagatgtaggacagatggaggcgaggattggtaaggattcagaaaaaaattgaagcaaaaagaatcggaaagatctttttctgcaaccatgtgttatctctgtgaggagtatgtgaatttcgtggggagtgagttttataaaagacatgtgttctagtgaaaaacagaaggtgggctccagacccctacacacctggtcttgaatgccagcactagggcatcactccagcgtcgcctggtgcagcctcgctgggcccagcttcttcatctataaaagaagcccactcttcttggtttggtaagaatcagtttataaacacacataaagtgcctagcgctatttctggtacatgataaatgtttaagatagattcattctcttgtttttttcatgtttttcacttaaacttttctcagaagcatttttctgtgaaatcaagggttttctaagtgtacgaaaatgattcttcttatattttgtggtgtatatagttgtgattctatttttctgataagcattctgataatcaactgctagatatgatatagaaggatgtttaaagttcagttagcttgtagcagacctaaccttactgtggattttgcactctgccttccggtggctgctgtgctgatgctgcgttctctgttgctgcgtgatgtacatcactggttttatttccatcctctcccactgtagctgcttcagccctcacatttgtaaaatgagggtgatgataatccctcctcagggcaatgagagagcctgtgaagtgtttgtgaccattcttggtatatagcagctactcagtaacatctgttattgtttattcacctttcttagaatgattttttttttctttgagggctacttactccagtttattattgagagttggaaaaaggtcaagctttttgagaagtgaaggagagaagtctgcattttccacttctagacccctctagaattatttttagcatttctttgtagtcagcaatgctttttctccttcattagcttaaagcagatggataaactttggtgagaagcttcccctagcccacagactagagatcagtgggcttttcaggcaggggtaagataagagacatcagctgtgcagtttctgtgtggaactataaagggatgtcacagcctatgcctcgctttccacttggggatttatggaggaggccttagcagagtcagccagcttaaaagtctcccaggaaaggctgcctctgatcggtagcacccacacatctggtttaaatggtcaggagtggagtgtgcagtggagcttgaccttgctggtaaaaatagatctggggcttggcatggtggctcacaactgtaatcccagtactttgggagaccgtggtgggtggatcatttgaggtcaagagtttgagatcagtctggccaacatggtgaaaccccgcctctactaaaaatacaaaaattagccaggcatggtggcgggcaccttgtagtccccagtagtagaattgcttgaactggggagacggaggttgcagtgagccaagatcgcgccactgcactccagcctgggcaacagagtgagacttcatctccaaaaaaaaaaaaagatctggaacattccttgtttctggcaatgccagactaagtctcttctgaaaacgacaataacatgctagacaggctgtattaaaatgcacctcaaaataatcacaaaaactgaaaagatagaaactcccagtccagttttgattgaaagtcttgcccagacaagtaagaagtatatagaaaattattttgccccaagtgcatttgccaaggttgtatgcttggcttttgttgaggagtatcgaggggtgagaggacagaagccgcgattccccaaagtggggattcttactggctatcctgcttgtattaagctggacctccaaagaaccattctcttaatagatggatgggtcaaaaataagttggtttcccaaacttcatgaaggagactgtaaagaaaaggaaaaaaaaaatgtgagaatgggtactacagactgcttctgatagggctctgcacccaaagttggccgtgaacttggcttgaggtgtcttcgattgatggtgcctgtgggtacttagcagaaagcaaactgccttggtgatggatgaaagacaagttcatactgggcctcagggaacctctacaaataatttttcaaaagcattaaccagtacaaagttagagataatcaagcacattaggagacatggcaacatgtagtaagaaacagcagaagaataaaaataccagcttatctgcccagactttgaatatgggaattacaaagcatgggtttaaaaataactttaattataccatatttagataaataaatgacaagcttgaaaattttaggaaatgggaaactgacaagttgaaatatttgaaaagaaccaaacagaacttcaagaactttactgtgcagtatgataatcagccacatgtagctatttaaatttaaactaattaaaattattcagttgtactcactacatgtggctagtggctatcttattaaatagcaagatataaatatttccattattgtaggaagttctgttttacaacagtaatctagaacttcagtggccaaaattgaaaacttaatatacatgtctgacagcaagttaggtatagcagagaacttaggaattagaagatagattagaaaaatattatccagaatgcagcagagaaagctaaaaagatgagaaaggatcaaaagaatcaaaggtaagtgacacagcagatatatcaagacagtctttgtgtttaatgaagtgtcctaggagaatgggagaggaaatatttgaagaaatgatgggtaaaaactttaagaacttttctaagacattaatgtcaccataactgacaactcactgtaattaccaaactgacatccctaaacttatacttaaaccaattgtattaagaaggtaatattcaattattatattaaggtaacattcaattattatattaaggtaatattcagttcaaatattcaaaaatactgtctcattatttacattttactactgtatattcactttaggttatttaaatgtttatatgagagttcagacctacttgttgaactcaaaattgttttattgctttgttatatgcatgtttcacaataacatttgttttgttaaaaaagtcgatccacttgcattatcagaggggcccaccacattaattcacacacacacacacacacacagacacacacacacacacacatatgtatatatacatacacacacagtactttattaaaaatgctttaagggatagctggttgaaggagttataaacttacttagatcagaggagttatatattctgagtgtttgagacaacatttaaaaacatcacttgatgctactcagatggaacataaggaagtcaccctcccatttaataaggggacatttgatgtgccctaatgagtagcacttgcagccataacctcacgtgataaattgcatctgcaagctatgtacatggcttggttctgggtaggttatgatacacgacaaccaaagggcatcagatagtgcagatgaggtgttcagggagtcggctgcagcgtgcccgaaacatcactgcacctgcctttcacattgtcctgatgcacatttccagttcactttagggagcagctttttttgttttgtttttgttaaatatttaaaatcccttaaaataaaaaaattgaattatgtagacaaaatttttgtttattctattctggaatctttcacacaacgaatatttattgagctcctaaaatacactagcattgtggttggtctaataccagtgagtagacactgccatctaactaataccagtgagcagacgttgccctgtaactaataccagtgagcagacactgccttctaaccagtaccagtgagcagacgctgccctgtaactaataccagtgagcagacgctgccctctaaccagtaccagtgagcagacactgtgctgtaactaataccagtgagcagatgctgccctctaaccaataccagtgagcagacgctgccctctaaccaataccagtgagcagacgctgccctctatctaacaccagtgagcagacgctgccctgtaaccaataccagtgagcagacactgccctgtaaccaataccagtgagcagatgctgccctgtaaccaataccagtgagcagacgctgccctctaaccaataccaggagcagacgctgccctctatctaacaccagtgagcagacgctgccctctaaccaataccagtgagcagacactgccttctaaccagtaccagtgagcagacgctgccctgtaactaataccagtgagcagatgctgccctctaaccagtaccagtgaacagacactgtgctgtaactaataccagtgagcagatgctgccctctaaccaataccagtgagcagaccctgccctctaaccaataccagtgagcagacgctgccctctgtctaacaccagtgagcagacgctgccctgtaaccaataccagtgagcagatgctgccctgtaaccaataccagtgagcagacgctgccctgtaaccaataccagtgagcagacgctgccctgtaaccaataccagtgagcagacgctgccctctaaccaataccagtgagcagacgctgccctgtaaccaataccagtgagcagacgctgccttctaaccaataccaggagcagacgctaccctctatctaacaccagtgagcagacgctgccctctaaccaataccagtgagcagacactgccctctaaccagtaccagtgagcagatgctacactcacagaccctgccttgaaccttttcctattttagtacccttatttatttatcttgcctgattgccctggccagaagttccaatactgtgttgaacaggagtggtaagaaatggcatccttgtcttgtgccagttttcaaagggaatgtttccagcttttgcccattcagtgtgatattggctgtgggtttgtcataaatagctcttattattttgagatatgttgcatcaatacctagtttattgagagtttttagcatgaaagggtgttgaatttttttgaaggcctttctgcatctgttgagataatcatgtggtttttgtcgttggctctgtttatgtgatagattacttttattgatttgtgtatgttgaaccagccttgcatcccagggatgaaacggacttgatcttggtgaataagctttttgacgtgctgctggattcagtttgccagtattttattgaggatttttgcatcgatgttcatcggggatattggcctgaaatttcctttttttgtgtgtgtctctgccaggtttttgtatcaggatgatgctggcctcataaaatgagttagagaggattccctctttttctattgattggaatagtttcagaaggaatggtaccagctccactttgtatgcctggtagaattcggctgtgaattcatctggtcccgggctttttttggttggtaggctattaattactgcctcaatttcagaacttgttattgatctattcagggattcgacttcttcctagtttagtcttgggagggtgtatgtgtccaggaattcatccatttcttctagattttctagtttatttgcatagaggtgtttataatattctctgatggtagtttggatttctgtgggatcagtgctgatctcccctttatcattttttattgtgtctatttgattcttctctcttttcttctttattagtcaggctagtggtctatctattttgttaatcttttccaaaaaccagctccgggattcattgattttttgaagggtttttcgtgtctctctctccttcagttctgctctgatcttagttatttcttgtcttctgtaagcttttgaatttgtttgctgttgcttctctagttcttttaattgtgatgttagggtgttgattttagatctttccccctttcacctgtgagcattttgtgctataaatttccctctaaacactgctttagctgtgtcccagagattctggtatattgtgtctttgctctctttggtttcaaagaactaatttatttctgccttaattgtgttatttactcagtagtcattcaggagcaagttgttcagtttccatgtagttgtgtggttttgagtgagtttcttaatcctgagttctaatttgattgcattgtgctgtgagagactgtttgttatgatttcaggtctttggcatttgctgaggagtgttttacttccaagtatgtggtcagttttagaataagtgcgatgtggtgctgagaagaatgtatactctgttgatttggggtggagtgttctgtagatgtctgttaggtccacttggctcagagttgagttcaagtcctgaatatccttgttaattttctgtcttgttgatgtgtctaatattgacagtggggtgttgaagtctcccatgattattgtgtgcgagtctaagtctctttgtaggtctctaagaacttgctttatgaatctgggtgctcctgtattgggtgcatatatatttaggatagttagttctatttgttgcattgatccctttatcattatgtaatgcccttctttttcttttttgatctttgttggtttaaagtcttttttatcagaggctaagattgccacctctgctttttttttctcccctgcttgccatttgcttagtaaatcttcctccatccctttattttgagcctatgtgtgtctttgcacgagatgggtctcctgaatacagcacaccgatgggtcttgacgcttcatccaatttgccagtctgtgtcttttaattgtggcatttagcccgtttacatttaaggttaatattgttacatgtgaatttgatcctgtcattatgatgctagctggttgttttgcccattagttgatgcagtttcttcatagtgtcaatgttctttacaatttgatatgtttttgcagtggctggtacaggtttttcctttccatatttagtgcttccttcaggagctcttgtaaggtagggctgctggtgacaaaatctctcagcatttgcttttctgtaaaggattttatttatttttcacttatgaagcttagtatggctggatatgaatttctgggttgaaaattattttcttgggccatacgcagtggctctcacctgtaatcccagccttttgggaggccaaggtgggcggaccatgagatccagagtctgagaccagcctggcccatatggtaaaaccccgtctctaataaaaatacaaaaaaattagccaggtgtggtggtgcccacctgtcgtcccagctactcaggaggccgagacagaagaattgcttaaacctggtaggcggaggttgcagtgagccgagatctcaccactgcactccaaacctgggagacagagcaagactgcatccccctccccaacaaaaaaagaaaagataaattctttaagaatgttgaatattggcccccagtctcttttggcttataggatttctgcagagagatctgctgttagcctgatgggcttcccttggtgggtaacccgacctttctctctggctgcccttaacattttttccttcatttcaaccttggtgaatctgatgattatgtgtcttggggttgctcttctcgaggagtatctttgtggtgttctctgtatttcctgaatttgaatgttggcctgtcttgctaggttggggaagttctcttgcatttaatatcctgaagagtattttccaacttggttccatttttccccatcactctcaggtacaccagtcaaacataggttgcttcttttcacacagtcccatatttcttggatgctttgttcattccttttcttttttttttttctctaatcttgtcttcacgctttatttcgttaagttgatcttcaatctctgacatcctttcttctgcttgatcgatttcgctattgatacttgtgtatgcttcacgaagttctcatgctatgtttttcagctcccatcaggtcatttatgttcttctttaaactggttattctagttagcatttcctgtaaccttttatcaaggttcttagcttccttgcattgggttagaacatgcttctttagcttggaggagtttgttattacccaccttctgaagcctgcttctgtcacttcgtcaaactcattctccatccaattttgttcccttgctggtgaggagttgtgatcctttggaagagaagagttattctggttttgggaattttcatcctttttgcactgggttttcctcattttcgtggatttatctacctttggtttttgatgttggtgaccattggatggggtttttgtgtggatgtccttttggttgatgttgatgctattcctttctgtttgttagttttcttcctaacgggcctctctgctgcaggtctttgggagttggctggaggtccactcctgcccctgtttgcctgggtatcaccagcagaggctacagaagagcaaagattgctgcctgctccttcctctggaagcttcatcccagagggcaccccccagatgccagctagagctctcctgtatgatgtgtctgtcaacacctgttgggaggtgtctcccagtcaggaggcacgagcgtcagggacccacttgaggaggcagtctgtccgttagcagagctcgagcactgtgctgggaggtccactgctctcttcagagacagcaggcaggaacatttaagtctgctgaagctgcacccacagccgccctttcccccaggtgctctgtcccagggagatgggagttttatctataagcccctgactgggcctgctgcctttctttcagagatggcctgcccagagaggaggaatctagagaggcagtttgggtacaacgtctttgctgagctgtggtgggctctgcccagtttgaacttcccagtgccttcgtttgcactgtgaagggaaacaggctacttaagcctcattaatggtggacacccctctccccaccaagctcgagcatcccaggtcgacttcagactgctgtgcaggcagtgagaattttaagccagtggatcttagtttgctgggctccatgggtatgggatctgttgagctaggccacttggcaccctggcttcagccccctttccaggggactgaacaactctgtctcactggcattccaggcactactgaggtatgaaaaatctcctgcagctggctcggtgactgcccaaatggctgcccagctttgtgcttgaaaccctgggccctggtggtgtaggcacccaagggaatctcctggtctgtgggttgcaaagaccatgggaaaagcgtagtatctgggccggaatgcaccgttcctcagggcacagtttctcagagcttcccttggctaagggagggagctcccccaccccttgtgattcctgggtgaggcgacaccccaccctgctttggctcgccctccatgggctgcacccgttgtctaaccagctccagtgagatgagctgggtacctcagttggaaatgcagaaatcacccgccttctgcattgatctcactggaagctgcagaccggagcttcctattgagccatcttgccagccaccctagtcatttttaaaaaacatcaagcagtgtgatatttgatgatcgtttttgtatagtagctcatgctactgatgtgtttgtatgatagtctttataatttatcatgaaagcagatctgtttttctgcctgccagaatgttagctgtaattgagtaactcattaatgtacctaattgtatacttatttttacacacttgtggtctttaaatgaatgtgccttttcttgaattctggccaaaaaatgaagcagcttcagtgtctttgacccttctatgcctgacatgaaaacaatgttttgaggttgtcctcccatataccacatggcataaaagattggttttgccatagtctagtgataccaactttatgtatgcattctaatgggaaaagaggggggtgtctgactagtccaagataagaatacaatgcagtgtctgggactgaacttttaaaaaatatatgttcatttttagaaaaagtcat

SEQ ID NO: 13849 - DNA, 824 bp, Homo sapiens
agacaagttatctcccatttctaaaattctgttcctttacacaggcctttatttagatgttttctttagcaactattaaaaaccctagtatgtttattttattctttttttaaaaataaacctggtgtcttaaagtgctttagtgagataattaggccctcagtgaggacagtatatctattaggttgactgtagacaccaacattagcctccattgctaatttgcagttcacaggttaatggcctagtcattttgttagacagatatgctttgccacttagtgtcttcaaaaactaaacagggaaactgagaagacattgtgataggctgttatttttgaaggttgcagttctctttgttggtcaagttgtggacaacaccctgttcaagctacacatagaggagccgtgagcaactctctgatgctgtgtatcctaaagttggcttcccagatgccactggagaacaccacggttcagcagatggtttttatgcttctttcaaacctggccttgtcgcatgactgtaaaggagtaattcagaagagtaacttcttacagaacttcctctctctagcattgccaaaaggaggaaataaacatctaagtaatctgactattctttggttgaagttactcctgaatatatcatctggagaagatgggcaacaaatgattctgaggcttgatggctgtctagacttactaacagagatgagcaaatacaagcacaagagcagccctttattgcctcttcttatctttcataatgtttgcttcagtcctgcaaataaacccaagatcctggctaatgaaaaagtcat

SEQ ID NO: 13850 - DNA, 6722 bp, Homo sapiens
cggcagtttaattctccggcggctgcagattgacgggacgagatggtcctggcagggctcatcaggaaactcggtcatcagctggccgagatcagggagcgcgctctcaagagtattctctgcaagattgagcacaacttaatctgctacgctgatctcattcaggagaggcaactttttcttcatttgctggaatggttcaatttcccgtccgttccgatgaaggaagaggttctgaacctgttaagcagattggttaagtatcccccagcagtccaacatttggttgacgttggtgcagtagagttcttatctaagcttcggtctaatgtggagccaaatctgcaggctgaaattgatggcattctggatggactttttcttcttccttcggaagttcctgcactatcttctgcctcataccaaaccaatcaaactgaattgtcaaaaaaccctgaaatcttaacaggatattttccccaagacaaaagtaatttccagcagatggaagtgccgccacgaccagtggtaaatcagactgtgaagtgcttgaagttttctacatttccttggctacccctgaccaccacagacagacatgtcctctcctctaatgaaagctctttaagaagtagtaaccacactttaatctggaacacctgtgaactattgaaggatgttatcatgcaagattttcctgctgagattttccttcaaaggccaaaaattgttcagagccttttatctctgttgaaactggcctttggagatggaaagcatcgcctggcattacagtcggtgtcctgcctgcagcagctgtgcatgtatttaagaaacagacttaactttcaccgagatccaggttttttctccaataaacacgacacagtttcccaaaattcttctttgtcttattgtcatgaagcaagaggtactcatcattcccagaatccttccccaggaagcagcagccctcggccttctgtggttgggcgcacaggccagcgacccagaggagatggccaggactgggatgcagcgtcctctagtggaagtagtagtcatgctcatgtaaactccaggatatccgttcattcacctttggatatgggacacatagatctgccagagctggaaactgaagacacattggaactacaattccagcagctcagtcttccccagttttgtgtctccattctggaatcagctgttcctctcttaagaacaggtagcagacaagtgataataagagttctggaattgcttacagaggatatgacacttattggtgaagcaatttcaacagatatctgggatgacagcagcctttttggtatagatatgaaggagaaactactcctggtgttgggagcccttggagaaaccatgtgctaccataaaagtagtatcagtttggagcagccagaggtgatgcttgtgcaccacagaatggcctttatcagcatttccctgtttgcagttcgactgctacaaacgcttctccctgttgaaaagctgttgtggcctatttggaacagctgaattctgaaaactacagtatttataaacgaactgcagaggccgtttattcaattgaatgcacctgtaacttcctgtctgatattgggaaagagggagagaagaatctcttagaattagtggagctggcagaccaagccttgcgtagcttttcctatcatcagcatttcccgctaataaaggaaatcatcagcatttgttcaaagatctggaaatctgctcaggccagtccattactacaaggagaaagtcagaaggtgcttctccatatgttgtctcacccattgccacgagtgaaagctgaaacttaccactgctgtctggaaatcacgaaggaatgtttaggtgtccataatgtcactaaacccgtgtcttcactttgcaatggaattcattttctacttcatccaaaagttctgtatgaaatctctgtatttggcattcaagagcccgaaagtgaggtgaacactgctgccaaggccattctgttatacctgcttcagggacgattgatgatgacagcattgacctggaacaagtttattgaatctctctgtcctgtcatcccaatactacagggctatgccgacacagaagatcctctgggtaactgcattctccttctaagcaaagcaagttctgacacagaagagatgcttccgtgtactacccgattaaagtccatgctgcgacttttgctagtgaaaaagccatcggtccgttcgctagcattaaagcttttagcattccatcttaccagtgaagaaggggctgatacaaagcgtcctctaatagacgccagagttctctccagagttactgatttattcattgggaagaaacctattgaactcagactggatgacagaagagagctggttattaagttggagactgttgaaaaggtatatgaaatcttcacctcagatgatgttgatctcgttttgagaaagtcagctgctgaacagttagctgtgattatgcaaggttgtagaatgtttggtacaaccatgcctcacactcttgaggaaggttttatgtggtgatccagtcatgcgtgtttcgctctcgcaacagtcttctcttttgaccgtgttattcagagtttccttaatatttcatgaagattgtagtgtcgtgactgaagttggagcactattttgtcttctattatttgatgaagtatcgagaatggatatgtggtctgttaatccttccaataaaccttctttgccatcggtcttcagtttgcctgtttccgtttttagaaggtaccatctacctgttcatgtaattggacaccatgctgtgagtccttactccatagttttgcccttatctgctgattgtttggccttgaagccggtgtcagatatgctgagaatagcttggaacctgtcatggtatcatgggagtgataatctgttgaagcaaatgaactctgaaactaaaacgcaagaaattttagatgcattgaagttatctacagaggacatcctcactctgaagataacacacatggctagtgggctgcaggactgcctccattccattgttcaggctgcaacccacagggaagttagggctgctgtcaccaggatgagtttttatcttctgaatgacagattgtctttaaagggttgccctggtccatgtggggttaccttgaagtccttggcttggcacaccgcactaaacaggtttttacaggtgcttcctgcttgcactgaagatgagaaactgctaatagatatcatacattttttaaataaattaataaaggaacaaagaaaaaattcttcactagaacttctaaactggattctcgaattacttcttagacatagtgcaaacccactgttagacctcttggttctgacagagtcacaggcacgagaagaaacagatgatatccggactgctgtcaggcaacaacttcagaaagaactgattgctctttttgataccttgctgctcaatttcatggaagttactgacaggaaatgctcggaacttctttacgtttttcaaacgcagctggctctgaaactgctccagtgtctgaaagtgacggatgcgcctcatttctatggcctgccgtcccttgagcggaccttacgagggatggctaacctcactgcgtttccgggatggagctcacactctcctctcacaaagcctctagatatctgtgtgaagtacttgtcaggtctccttgaggtcattacttctttttatgtggagcgtggaggaaatgctatgtccttcatgggaaaaggtgttacaaagagcacaattctttgcttgcttcacttatcccatgagatgatggcccaggctgggagcttggagtggatgtcactttggttcttgcctttgggtagtcatagtgaagaacatattcctactcaacaaggattggcttggttgattccattatgggttgatcgggacccagaggtgagattcacttcactgggattaggatcagcactgaccacccttgaaacgggctgtgtggccttagcaaacagttgtcagaacatttccggtgggctctggggaactgtggtgaacattcttctggaccagtcagaatgtagtatggtgcgccgggaggcggcatttattcttcagaatctccttgtaattccaatgcctacagaaattataaaggattatacttggcagggtccctgtgttcatgatgaggactctggcctatcgctcattggaaaacctgcccttcaggctcttttatatcactgccatttttatgaacatttgaatcagatggtaaagcattgttacctaggacggtgtatgtttgatttgaatttttctgcttttgatagaaattcagaaagcaatgatttaaatggtttagatgactcattcaagttttggagggctccatctaggacaagtcaggatcgagatccaagttctctctccacctcagaaacaacggtggcaccttcattggggagtactgaatttcagccacttgtgcagtcaacaacacttctacctgaagcctcccatgaccagtttgtggctcaaggtcaccaggaaagtacatcaccacggccacctcatgattcatctctttctgctcccctgcccaaactgtgtgtttttgttactccatctcttctttcagcaatgtgcagcctcttggacaacctcttgacgattgctcccagagacactgcaaaggcttttcgacaagctcatctcatagaacttctctgtagcattgcagatgctaccctcatacagacatgtgtccaggaactcagagccctgctgccttcatcacctccagctgaacacactcaggctcaggtttcctttctcctggaatacctatcctctttgtccaggcttctgcagtcatgtttattggtggagcctgaccttgtgattcaggatgagcttgtgaaacctcttatcaccaatatcattggaattctcaccatatgtaccaaagatgtattagataaagagttaatatcagctttttatcacacatggacacatttatttaatcttctggccatgctcctgaggaaagctggtgccatcacactcccgtttgttaccgtggccctggccaagcactggacagcggcgattgatatgttctgcacatgtgcaggcttgtctgccacgtgtcctgccctgtatactgccagcttgcaattcctttctgttctcttgaccgaagaagcaaaagggcatctccaggctaagagcaaaacacatttatgctgtagtccaacagtggcttcacttcttgatgactctcaggaaaatcagaaatctctagaacaacttagtgatgtaatccttcagtgctatgaagggaaatcctccaaagatatcctgaaaagagtagctgcaaatgcattgatgtcactgctggctgtcagtagaagagcacagaaacatgctttgaaagccaatcttatagacaattgcatggagcagatgaaacacataaatgcacaactgaacctagattctctgaggcctgggaaagcagcattgaaaaaaaaggaggatggtgttattaaagagttaagcattgccatgcagctcctaagaaactgtctttatcaaaatgaggaatgtaaagaagcagctcttgaagctcaccttgtccctgtcttgcactctctctggccttggattttgatggatgattcattgatgcaaatttctctgcagctcctttgtgtctatactgcaaattttccaaatggttgcagttctctttgttggtcaagttgtggacaacaccctgttcaagctacacatagaggagccgtgagcaactctctgatgctgtgtatcctaaagttggcttcccagatgccactggagaacaccacggttcagcagatggtttttatgcttctttcaaacctggccttgtcgcatgactgtaaaggagtaattcagaagagtaacttcttacagaacttcctctctctagcattgccaaaaggaggaaataaacatctaagtaatctgactattctttggttgaagttactcctgaatatatcatctggagaagatgggcaacaaatgattctgaggcttgatggctgtctagacttactaacagagatgagcaaatacaagcacaagagcagccctttattgcctcttcttatctttcataatgtttgcttcagtcctgcaaataaacccaagatcctggctaatgaaaaagtcattactgtgcttgctgcctgtctggaaagtgagaatcaaaatgctcagaggattggagcagctgccctttgggctctgatttacaattatcagaaggcaaaaacagctttgaaaagcccatcagtaaaaagaagagtggatgaagcatactccttagcaaagaaaactttcccaaactcagaagcaaaccctctaaatgcctattatttgaaatgtcttgaaaacctcgtgcagctccttaattcttcctgagtgccatgggatgctacaccttgaagctgacagtcatcaacaggggagctaaagttgaagccagctgtgtgtagcagctgttacctgaagacgtgctacctctctacaaagtgttgatccccttctttcccatgagagagagaactggtgatactccaacaccgtccagttgtggcagctct

SEQ ID NO: 13851 - DNA, 2355 bp, Homo sapiens
attaattgtggctggacgcagtggcgcggcagtttaattctccggcggctgcagattgacgggacgagatggtcctggcagggctcatcaggaaactcggtcatcagctggccgagatcagggagcgcgctctcaagagtattctctgcaagattgagcacaacttaatctgctacgctgatctcattcaggagaggcaactttttcttcatttgctggaatggttcaatttcccgtccgttccgatgaaggaagaggttctgaacctgttaagcagattggttaagtatcccccagcagtccaacatttggttgacgttggtgcagtagagttcttatctaagcttcggtctaatgtggagccaaatctgcaggctgaaattgatggcattctggatggactttttcttcttccttcggaagttcctgcactatcttctgcctcataccaaaccaatcaaactgaattgtcaaaaaaccctgaaatcttaacaggatattttccccaagacaaaagtaatttccagcagatggaagtgccgccacgaccagtggtaaatcagactgtgaagtgcttgaagttttctacatttccttggctacccctgaccaccacagacagacatgtcctctcctctaatgaaagctctttaagaagtagtaaccacactttaatctggaacacctgtgaactattgaaggatgttatcatgcaagattttcctgctgagattttccttcaaaggccaaaaattgttcagagccttttatctctgttgaaactggcctttggagatggaaagcatcgcctggcattacagtcggtgtcctgcctgcagcagctgtgcatgtatttaagaaacagacttaactttcaccgagatccaggttttttctccaataaacacgacacagtttcccaaaattcttctttgtcttattgtcatgaagcaagaggtactcatcattcccagaatccttccccaggaagcagcagccctcggccttctgtggttgggcgcacaggccagcgacccagaggagatggccaggactgggatgcagcgtcctctagtggaagtagtagtcatgctcatgtaaactccaggatatccgttcattcacctttggatatgggacacatagatctgccagagctggaaactgaagacacattggaactacaattccagcagctcagtcttccccagttttgtgtctccattctggaatcagctgttcctctcttaagaacaggtagcagacaagtgataataagagttctggaattgcttacagaggatatgacacttattggtgaagcaatttcaacagatatctgggatgacagcagcctttttggtatagatatgaaggagaaactactcctggtgttgggagcccttggagaaaccatgtgctaccataaaagtagtatcagtttggagcagccagaggtgatgcttgtgcaccacagaatggcctttatcagcatttccctgtttgcagttcgactgctacaaacgcttctccctgttgaaaaggcaagcgagtttttatcagagcctatgtcaacagcattatttctcctttctttggacatgcctatttctttggaatatccaaatattcatgaagctgttgtggcctatttggaacagctgaattctgaaaactacagtatttataaacgaactgcagaggccgtttattcaattgaatgcacctgtaacttcctgtctgatattgggaaagagggagagaagaatctcttagaattagtggagctggcagaccaagccttgcgtagcttttcctatcatcagcatttcccgctaataaaggaaatcatcagcatttgttcaaagatgtaatattttctttcttaatgtgattacgttattattggacacttagggtgtgtgtaaacttagaaacagtgaaagtgaaactgactgtatatctttgttattattttttagtttaattgcttttatatgtgtctgatttttaaagggtatatgtacagctgcattaggatacttaactgttatattcaagattaaacttcaaaaatgtcatgcctacaatcaaaatgaataatccttggatttttatacatttgtttttggtatccatccagactattcacacacattgtttatttatctttaaagttttaattaataacttaaactgagagttttgtaacttttattactttgtacctttttcttatgtggatttttagaaaagactgtgtattggttaatttattttgaggacatcagcaaatttctatttagaacttagtgtctttattgcttttggaaagaataaattctgtgatgtgat

SEQ ID NO: 13852 - DNA, 18149 bp, Homo sapiens
ttttcaaacgcagctggctctgaaactgctccagtgtctgaaagtgacggatgcgcctcatttctatggcctgccgtcccttgagcggaccttacgagggatggctaacctcactgcgtttccgggatggagctcacactctcctctcacaaagcctctagatatctgtgtgaagtacttgtcaggtctccttgaggtaagtaaaaatagcatatggtagttatttactattagttgcttttactttatgccaggccacaagtgcattatacgttactctattcaatgtagaatattatacattatttatataagtcataatagtgaaatgttttagtgatttttattaatagttaagtaaggaaggtcacttttataaataccctcattttcaaaagaaataaatggaaacttttgatgctcaaaggaagtgttcgctagagcatttcagattttggatttttggattaggaatgctcaaccagtaagtatatgatacaggtatttcaaaatccaaacaactccaaaattcaaacacttctggtcccaagcattttgtatacggcatactcaggctgtacaatgttaaaggatatttgttttttctttttcttccagtttgtgcagttctagatgctactgctatgaacattcttatcttttggtgaaaatgagcatcttttttgaaattttatcttctgttattgaaatatgtaaatatagccaatttttatatgttgaccatgtatcaggcaattcttatttccaatatcaaaacaaaagcctttaatttttcacccttcagtatgctgtttatagtttttttttgtcaattaagaaagatcaagttaaggaagttttcttttgtcctgttttgctaggagctttgttttttaattcataattgtatattgcttttttctgtatcttttaagataatcacatgatttttcccttatattccattactgattgattttaaaatgttaaacaaccttgcatttctcgaaacatttcagttaggttgtgatgtattactctttttatatgttagtggatttcgtttctcaattttttagaattctgaagtttttagaattattctatttcctcatgtaaaaaagtttttcgaattttgcatcttttttctcttaaagaatttgtcaggtttttaataatcaaaatcattccgttcttatgactaaaatgggagaatgtgagattgtaagaacgtgactttttcaaccattttaaatcttttcctttatataactttcttttttggaatagctgatttgcattggtgtgattttgttctctaatgttaggtagaatttgatcgtgaaacaatcttggtttgcagttttctttttgggaagattgtaaattgtgaaatgaaatgactttttttttttttgagacagagtcttgctctgttgcccaggctggagtgcaatggcatgatctcagctcactgcaacctctgcctcccgggttcaagtgattctcctgcctcagcctcccaagtagctgggattacaggcgcctgccaccacgcacagctaatttttgtctttttagtagagacagggtttcaccaggttggccaggctggtgtcgaactcctgatctcaggtgatccacacccgtcttggcctcccaaagtgctgggattacgggtgtgagccactgcgcctggcctgaaatgactttttaaatagatctaaaatcgttcagagtttctttttatgtgtgtcagccttagtaagttatgtttttgtagaacttaaaaactttttatctaatttttaaaatttgttactgtgaaggtattcatcaaatcatcttacacttttaatgtctgctgaatctgtagtgaggtcccctttcattgcagacattaattattcctttctcaatttttcttggtttatctttctaatagaatgaacctttggctttgttgagcctctctttaacttttttctcctgttttatttctgccaatatttattatctccttctacttttagtttagtttacagctcttttttctaacattttaaggtagaggcttacgtcattgatttttttaaaagtctttctcaaatgtgtgtttttagctctaatcctctaagcatggccttatgccatgtttttatcatcaatttaggtcaaaatatttctactgtgatataataaatacgacaatgatatggttgtacatagttctatgagaacagcctcatcacagtggcctgacaattttgcatatctgcccttgggcttcatagacaaggcttaactacagccaatctaaatcttggcagaatttcctgtgatccttctggaacatgagaatatgaaaggcttatgagcagctgactatgcaagattgattctcacttacttcacagtctattaggaagtcagttaggagcccgtttcttattggttcctaggttccgacgagcactgggctttctgccttgctctccttggggcatagctacagcttataaaactgctttactgcagcacggcatgggcttctccgcaacagagtgtcctacatctttgttatagtcatctggcccctttgtttcaatgtcatcctgtgcaagggatactagtagctggcacctttgtctattcttgcttttgctgtttatgtaggtaataaactgtctgaatccaaaaattactcattgttttcttactggacaaatctgtcagccttgttttgattgctaactgtgttcggacctcaagaatgattcttgtaggaagcactgtagagttagattttgaaagataagtaaattgatagtgatagcaatagacattctagacatggaattttctgataaaattgtatctataacctcctgtttttttttcatgctgtgggtgacttcttgacatcatataatctctacctattgccagattatttttcagaaacataaatttttcaatccaaacctctttttttttcaagagcataagactcaatattttgcatttagagatttgcctccattgtagttttttcccacatctctgaattttcagttatatctggctgtttttccaaaataaaaatgcactttaaaaagactgcttctttcacatagtttcctctcttttagggatggcaatatctacaaaaaatttaagatctaacttatttatttaccttcatttagtaaaccttttcttattcttccaaggttggatacttacctaatactgtttggcctttcctgtaggttatatacctgtaacaatttatatatgtggctattacttaatacattatatttttatttattttactttatttctttgagacagggtttaccgtgttgctcaggctggaatgcagtggtgcaatcacagctcactacagcctcaacctcctgagcccaagtgatcttcccacctcagcctcccaagtagctggggccacaggtgtgcaccactacacctggctggtttaatttttttgtagagatgggtctcactatgttgcccaggtttgtcttgaattctttggcgcaaatgatcttcccactttggcctaccaaagtgctgctattacaggcatgagccactgtaactggacctttattttgttttctgcattgctctagtagactatgagcttataagtatcatctttgggctatttctactatcccatggctactgcattgacctagcaccatggtttttacatagtggttagtgaatcagttaattaatatatgtgctacataatacatatatattgtgtatagtttttaaattaagatacagtttgaaaaacattttggaaatgtagcataaatgattataaaaatatgttttattgttgtatttttattactaaataatgatttaaataatgtatatatatattttatctggtcttatctagaacttttttccaaaagcacatattgtttttaaaacaagtttaaagatcataaatactctttgctgtactgtaaaatttaatatgaatttcactggagtccctttaataaaataaatttcggagaggttccaagatggccaaataggaacagctctagtctacagctcccagcatgagcgacgcagaagacgggtgatttttgcatttccagctgaggtaccgggttcatctcactggggcttgtcggacagtgggtgcagcccacggactgtgagcagaagcagggcggggcatcgcctcacccaggaagcgtaagaggtcagggaattccttttccaagccaagggaagccgtgacacatggtacctggaaaattgggacacttccaccctaatactgtgcttttccaatggtcttagcaaacaatacactaggagattatatcccacgcctggcttggagggtcccacgcctatagagcctcgctcactgctagcacagcagtctgagatcgaactgcaaggtggcagcgaggctgggggaggggtgtccgccattgctgaggcttgagtaggtaatcaaagcggccgggaagctcgaactgggtggaacccaccacagctgaaggaggcctgcctgcctctgtagactccacttctgggggcagggcatagctgaacaaaaggcagcagaaacctctgtagacttaaacgtccctgtctgacagctttgaagagagtactggttctcccgttacagagtttgagatctgagaacagacagacagcctcctcaagtgggtccccaacccccgagtagcctaactgggagacacttcccagtaggggccaactgacacctcatacagccgggtgcccctcttgagacgaagcttccagaggaaggatcaggcagcaacatttgctgttctgtaacatttgctcttctgcagcctccgctggtgatacccaggcaaacagggtctggagtggacctccagcaaactccagcagacctgcagctgagggtcctgactgttagaaggaaaactaacaaacagaaaggacatccacaccaaaaccccatctgtacgtcaccatcatcaaagaccaaagatagataaaaccacaaagatggggaaaaaacagagcagaaaagctgaaaattctaaaaatcagagcacctcttctcctgcagaggaacacagctccttgtcagcaacggaacaaagctggacggagaatgactttgacgagttgagagaagaaggcttcagaagattggtaataacaaacttctccaagctaaaggaggatgttcgaacccatcacaaagaagctaaaaaccttgaagaaagattagacgaatggctaactagaataaacagtatagagaagaccttaaatgacctgatggagctgaaaatcatggcacaagaactacatgacatatgcacaagcttcagtagctgatttgatcaagtggaagaaagggtatcagtgattgaagatcaaatgaatgaaatgaagcgagaagagaagtttagagaaaaaagaataaaaagaaacaaacaaagcctccaagaaatacgggactatgtgaaaagaccaaatctacatttgattgttgtacctgaaagtgacggggagaatggaaccaagttggaaaacgctcttcaggatattatccaggagaacttccccaacctagcaaggcaggccaacattcaaattcaggaaatacagagaacgccacaaagatactccttgagaagagcaactccaaggcacataattgtcggattcaccaaagttgaaatgacagaaaaaatattaagggcagccagagagaaaggtcccgttacacgcaaagggaagcccgtcagactaacagcggatctctcggcagaaactctataagccagaagagagtgggggccaatattcaacattcttttttttttatgatttgcttttttttttttttttgaagtatttattgatcattcttgggtgtttctcggagagggggatgtggcagggtcataggataatagtggagagaaggtcagcagataaacacttgaacaaaggtctctggttttcctaggcagaggtccctgtggccttccgcagtgtctgtgtccctgggtacttgagattagggagtggtggtgactcttgaccagcatgctgccttcaagcatctgtttaacaaagcacatcttgcaccgcccttaatccatttaaccctgagttgacacagcacatgtttcagagagcacgtggttgggggtaaggttatagattaacagcatcccaaggcagaaaaatttttcttagtacagaacaaaatggagtctgctatgtctacttctttctacacagacacagtaacaatctgatctctctttcttttccccacatttcccccttttctttttgacaaaactgccatagtcatcatggcccgttctcgatggtcgctgtctcttcagagctgttgggtacccctgcagacaggctgtcacttcatgcttggaagattgcacagcggccaggcagaggcgctcctcacttcccagacgaggcggccaggcagaggcgatcctcacttcccagacggggtggcggctgggcagaggcgctcctcacatcccagacggggcagccgggcagaggcgctcctcacttcccagacgggacagctgggcagaggcgctcctcacttcccagacggggcgcctgggcagaggcgctccccacttcccagactggacagctgggcagaggcgctcctcacttcccagacggggcgcccgggcagaggcgctcctcacttcccagacggggcagccaggctcaacattcttaaagaaaagaattttcaacccagaatttcatatcctgccaaactaagtttcataagtgaaggagaaataaaatcttttacagacaagcaaatgctgagagatttgtcaccatcaggcctgccttacaagagctcctgaaggaatcactaaacatggaaaggaacaagcggtaccagccactgcaaaaacatgccaacttgtaaagaccattgatgctaggaagaaactgtatcaactaacgagcaaaataaccagctaacatcatgatgacaggattgaattcacacataacaatattaaccttaaatgtaaatggtctaaatgctccaattaaaagatacagactgggaagttggataaagagtcaagacccatcagtgtgctatattcaggagactcatctcacgtgcagagacatacataggctcaaaataaagggatggaggaagatcaaccaagcaaatggaaaacaaaaaaaggcaggggttgcaatcctctctccgataaaacagactttaaaccaacaaagatctaaagagacaaggccattacataatggtaaagggatcagttcaagaagaagagctaactatcctaaatatatatgcacccagtacaggagcacccagattcataaagcaagtccttagagacctacaaagagacttggactccacacaataataatgggagactttaacaccccactgtcaacattagacagatcagtgagacagaaagttaacaaggatatccaggacttgaactcagctctgcaccaagtggacctaataggcatctacagaactctccaccccaaatcaacagaatgtacattcttctcagcaccacatcacacttattccaaaattgaccacatagttggaattaaagcactcctcagcaaatgaaaaagaacagaagttatgataaactgtgtctcaaaccacagtgcaatcaaactggaactcaggattaagaaactcactcagaacagctcaactacatggaaactgaacaacctgctcctgaatgactactgggtacgtaacgaaatgaaggcagaaataaagatgctctttgaaaccagtgagaacaaagacacaatataccagaatttctgggacacatttaaagcagtgtgtaaagggaaatttatagcactaaatgcccacaggagaaagcaggaaagatctaaaattgacaccctaacatcacagttaaaagaagtagaaaagcaagagtaaacacattcaaaagctagcagaaggcaagaaataactaagaacagagcagaaatgaaggaggtacagacacaaaaacccttaaaaaaaattggtgaatccaggagctggttttttgaaaagatcaacaaaatagatacaccactagcaagactaataaagaagaaaagagagaagaatcaaatagatgcaataaaaaatgataaaggggatatcaacaccgatcccacagaaatacaaactactatcagacaatactataaactcctctatgcaaataaactagaaaatctagaagaaatggataaatttctggacacatacaccctccgaagactaaaccaggaagaagttcaatttctgaatagatcaataacaggctctgaaattgaggcaataattattagcctaccaaccaaaaaaagtccaggaccagatggattcacagctgaattctaccagaggtacgaagaggagctagtaccattccttctgaaactattccagtcaatagaaaaagagggaatcctccctaactcattttatgaggccagcatcatcctgataccaaagcctggcagagagacaacaaaaaaagagaattttagaccatatccctgatgaacatcagtgcaaaaatcctcaataaaatactggcaaactgaatccagcagcacatgaaaaagcttatccaccatgatcaagtgggcttcatccctgggatgcaaggctggttcaacatgcacagatcaataaacgtaacccatcatataaacagaaccaaagacaaaaaccacatgattatctcaatagatgcagaaaaggccattgacaaaattcaacagcccttcatgctaaaaactctcagtaaattaggtattgatgggacgtatctcgcaataataagagctatttatgacagacccacagccaatatcatactgaatgggcaaaaactggaagcattccctttgaaaactggcacaagacagggatgccctctctcaccactcctattcaacagtgttggaagttctggccagggtaatcaggcaggagaaagaaagaaagggtattcagttaggaaaagaggaagtcaaattgtccctgtttgcagatgacatgattgtatatttagaaaaccccatcgtctcagcccaaaatctccttaagctgataagcaacttcagcaaagtcgcaggatacaaaaaatcaatgtgcagaagtcacaagcattcctatacaccaataacagacaaacagctaaatcatgagtgaactcccattcacaattgcttcaaagagaataaaatacctaggaatccaacttacaagggatgtgaaggacgtcttcaaggagaactgcaaaccactgctcaaggaaataaaagaggacacaaacaaatggaagaacattccatgcttgtggataggaagaatcaatatcatgaaaatggccatactggccaaggtaatttatagattcaatgccaccttcatcaagctaccaatgactttcttcacagaattggaaaaaactactttaaagttcaaatggaaataaaaaagagcctgcattgccaagacaatcctaagccaaagaacaaagctggaggcatcacgctacctgacttcaaactgtactacaaggctacagtaaccaaaacagcatggtactggtaccaaaacagagatatagaccaatggaacagaacagagccctcagaaataataccacacatctacaaccatctgatctttgacaaacctgacaaaaagaagaaatggggaaagcattccgtatttagtaaatggtactgggaaaactggctagccatatgtagaaagctgaaactggatcccttccttacaccttacacaaaaattaattcaagatggattaaagacttaaatgttagacctaaaaccataaaaacccaagaagaaaacctaggcaataccattcaggacataggcatgggcaaggacttcatgactaaaataccaaaagcaatggcaacaaaagccaaaatagacaaatgggatctaattaaactaaagagcttctgcatagcaaaagaaactaccatcagagtgaacaggcaacctacagaatgggagaaaatttttgcaatctacgcatctgacaaagggctaatatccagaatctataaagaacttaaagaaattttgcaagaaaaaaacaactccatcaaaaagtgggcgaaggatatgagcagacacttctcaaaagaagacatttatgcagccaacagacacatgaaagaatgctcatcatcggagaaatgcaaatcaaaacgacaatgagaaaccatctcacaccagtcagaatggcaacattaaaatgtcaggaaacaacaggtgctggagaggatgtggagaaataggaacatttttacactgttggtggaactgtaaactagttcaaccattgtggcagacagtgtggtgattccttaaggatctagaactagaaataccattttacccagccattccattactgggtatatacccaaaggattataaatcatgctgctatattcatggaactagcccaaatgtccatcagcaatagactgggtgaagaaaatttggcacatatacaccatgtaatactatgcagccataaaataggatgagttcatgtcctttgtagggacatggatgaagctggaaaccatcgttctcagcaaactatcgcaaggacagataaccgaacactgcatgttcgtgctcataagtgggaattgaacaatgaaaaacttggaaacagggtagggaacatcacacaccagggcctgtcatggggtaggaggagggtggagggatagcatcaggagatatacctaatataaatgacaagttaacaggtgcagcacaccaacatggcacatgtatacatatgtaacaaacctgtacgttgtgcacatgtactctagaactttaagtatattaaaaaaataaaataaacttcattttttaattataaatattaaaaaaggttcaactgtcagtatactaattagttattttctgctgtctattagaaatgtatgaattttaaaaaacaggtatattaaagagttaatgataatatttcttagaaagtcagctcctctagtgcatttaaaatataattcagttagtctagctagtggcctatctatctcattaagtttttcaaaaaaacaactcctggatctagtgacctttcgaatggtttttcatatcttgatttccttcagttcagctctgattttggttatttcttgtcttctgctagtttggggttgatttgttattgctgctctaattctttcagttgtgatgttaagttgttaatttgagatctttctaactttttgatggaggcatttagtgctacgaatttccctcttaacactgccttagctgtgtcccagagattctgatgtgttgtaactttgttctcatgagtttacttgtgtaacaaacattcacgttacccgtgaacctaaaagtttaaaaattaaaaaaaatatataattgaacctataagtacctagtttatagcattttttgtcatgtgatttataaatactctatttatcaaccttttacagagtcagtctcctctagaaaatgagttttactctttgaaatcaggaataggtgaggacctgccacagcggtaactaaagaagaagtgaagtgttgcctcatttatgtttagaaactatcagaagtgcttttgttttaaaattacgtgcaaagactttagatcacacctacgtttcaaataccagaaattgaaatgaactgttaatgtattggagaacaaaagggcttagttttaggtaagaagtgtaggcaaaaaggcagtagtccattctgtgttcagttgtctttgaggtaataaaatttagtaacagtttgttagctaaaggatacataaaaagcacagtccctgttatgtaatgtttcgcagttataaaaaatttgattagccaatcttgctttggtttaaaaaggaggtcgttttgtgcttcataaaacatctcgagcagaaaatctttatgactttatgttaaatggcaggcaaatattaggaaagaatccgtcacttttgttaaaaattgtagcagggtaacatttaatcttgggactatctgcttagtttattaattacataaacaggtatccctgttgtactactaatgactaaattcatcttttaaagaataaagtaaggcttatgtgagagaacattgaaacaaagtcattgttggtccaaatgatttgcttcatagtttcttagtaattaaagctgtttcctttttggaagggagccatatttctaataaaagattagcttgtttctgcacagtgaaatttgaatatgagtatttgctttttgtagctgtgaaatgagactttttaactaagcatgattaattatgataggtgaataaactatgataattaaatctttaaatcagatacatgatgtataattccagaggtctgacaaaaatatcaagttgaaagaaaatactggcaaaggtcttggcttgtcatttataagctagaattaaaaatcattacacagatcacagatgttagatatctccaaagatgacttagaggaagataataaggatctgatcatttagatattttatttttcaagtagtcacttaaaattttaaatttttgaccttggggaaggggcagctgtgggcacagcttcagcaaacttaaatattcttgcctgccggctctgaagagagcagtggatctcccagcacagcactcaagctctgctaagggacagactacctccttaagttggtccctgaaccccgtgcctcctgactgggagacacctcccagcaggggttgacagacacctcatataggagagctctgctggcatctggcaatgcccctctgggacgaagcttccagagtaaggaacaggcagcaatctttgctgttctgcagcctccgctggtgatacccaggcaaacagggtctggagtggacctccagccaactccagcagaccagcagcagaggggcctgactgttagaaggaaaactaacaaacaggaatagcatcaacaccaacaaaaaggacttccactcagagaccccatccaaaggtcaccaacatcaaagaccaaaggtagataaatccatgaagatgaggaaaacccagtgcaaaaatgcggaaagttccaaaaaccagaatgcctcttttcctccaaaggatcacaactccttgacagcaagggaacaaaactggatagagaatgagtttggtgaattgacagaagtaggcttcagaaggtaggtaataacaaactcctccaagctaaaggagcatgttctaactcaatgcaaggaagctaataaccttggataaagggtagaggaattgctaactacaataaccagtttagagaagaacataaatgacctgatggagctgaaaaaaacagcaccagaacttcgtgacacatacatgagtatcaatagccgaatcgatgaatcagaagaaaggatatcagagattgaagatcaacttaatgaaataaagcaagaagacaagattagagaaaaaaaaaaaacaaaagggaatgagcaaagcctccaagaaatatgggactatgtgaaaagagtgaacctacgtttgattgatgtacctgaaagtgacagggagaatggaccaaattggaaaaaactcttcaggatattacctaggagaacttccccaacctatcaagacaggccagcattccaattcaggaaatacagagatcaccacaaacatgctccccgagaagagcaaccccaagacatgtaatcgtcagatttaccaaggctgaaatgaaggaaaatatattaagggcagccagagaggtcgggttacccacaaagggaagcccatccctgttagtcttaccagcggatctctctcagacaccctgcaagccagaagagagtgggggcctatattcattaataaagaaaataattttcaacccagaatttcatatctagccaaactaagcttcaaaagcgaaggagaaaatcctttacagacaagcaaatgctgagagattttgtcaccaccaggcctgccttacaagagctcctgaagaaagcactaaatatggaaaggaacaaccagtaccaaccactacaaaagcataccaaattataaagaccattgatgctatgaagaaactgcgtcaactaatgggcaaaataaccagctaacatcgtaatgacaggatcaattcacacataacaatattaatcttaaatgtaaacaggctaaatgccccaattaaaagacacagactggcaaattggataaagaggcaagacctatcagtgtgctgtattcaggagacccatctcacatgcaagacacacataagtttgaaataaagggatggaggatgatttaccaagcaaatggaaagaaaaaaaaaagcaggagttgcaattttcatcactgataaaacagattttaaaccaacaaagataaaaaaaaaaacaaggcattacataatgataaagggatcaatgcagcaagaagagctaactgtcctaaatatatatgcacccaatacaggagcacccagattcgtaaagcaagttcttagagacctacaaagagacttagatttccacacaataacagtgggagactttaacacctcactgtcaatattagatcaacgagactgaaaattaaaaaggatattcagaaaaaaaaaaagggatattcaagagttgaactcagctctggaccaagcggacctaatagacatctacagaactctccaccccaaatcaacagaatatacattcttctcagcaccacatcgcacttattctaaaattgaccacataattggaagtaaaacactcctcagcaaactcaaaagaatggaaatcataacaaacagcccctcagaccacagtggaatcaaattagaagtcagcattgagaaactaactacaaaccgcacaactacatggaaactgaacaacctgctcctgaatgactactgggtaaataacacaattaaggcagaaataaattagttctttgaaaccaaagagaacaaagacacaatataccagaatctctgggacacagctaaagcagtgtttcaccaaatgcccacaggaggaagggggaaagatctaaaatcgacaccctaacatcacaattagaagaactagagaagcaatggcaaacaaattcaaaagctagcagaagacaagaaataactaagatcagagcagaactgaaggcgacaagagacacaaaaaacccttcaaaaaaaatcaatgaatccaggagctggtgttttggaaaagatcaacaaaatagatagaccactagcctgactaataaagaagaaaagagagaagaatcaaatagacacaataaaaaatgataaaagggagatcagcactgatcccacagaaatccaaactaccgtcagagagtgttataaacacctctacgcaaataaactagaaaatctagaagaaatggataaattcctggacacatacaccctcccaagactaaaccaggaagaagttgaattcctgaatagaccaataacaggctctgaaattgaggcaataattaatagcctagcaaccaagaaaaggaccagagggattcatagccgaattctactagaggtacaaagaggatctggtaccattccttctgaaactattccaaatgatagaaaagagggaatcctccgtaactcattttatgaggccagcatcatcctgataccaaaatctggcagagacacaacaaaaaaagaaaatttcaggtcattatcactgaggaacatcaatgcaaaatcctcaataaaagactggcaaaccgaatccagcagcacatcaaaaagcttatccaccatgatcaagttggcttcatccctgggatgcaaggcccgttcaacatatgcaaatcaataaatgtaatccatcacataaacagaaccagtgagaaaaaccacatgattatctcaatagatgcagaaaagtctttcgataaaattcaacatctcttcatgctaaaaattctcaataaactaggtattgatgagacatatctcaaaataataagacctatttgtgacaaacccacagccaatatcatactgaatgagcaaaagctggaagcattccccttgaaaaccagcacaaattattcataaactctttaaaaggatgctataacatttttaaaaatattataagcatattctaagttacaactgtgtactaggagggcaccacacatctttttttttttttttacagactttaaaaggaaaaatattgaaactaagaatttttgtttttgttttgaaaaattacaggatctcactctgtaacttaggccaagtgcagtggtgcaatcatagctcaccgcaagctccagctcccaggctcaagggatcctccctcctcagcttccccggtagctgggactacaggtgtccactgccatgcctggctaatttttttcttttttaaagtagactgggtcttgctatgttatgtaggctgaagaatattttcttttaacaatggtaaaatacccataacataaaatttaccatcttattcatttttaagtatataaactaaaaatattacaactttataaggtaaggattcaattcatacaagtcagtagacagttatatatttatctttatataccattgagaataaagccaccatgaaattgtttacatttgtttttcaggtcattacttctttttatgtggagcgtggaggaaatgctatgtccttcatgggaaaaggtgttacaaagagcacaattctttgcttgcttcacttatcccatgagatgatggcccaggctgggagcttggtgagcgcgttaaagctgtctatcttctgaacatttgcttgaaagggaatgtgctgtgtccaacacatttcaagcatataaacttgccacatgaaaatgtctcttttgacttttctttttaggtaacgtgaatgatttttgactagaatatttcttagaagttgtatattaacaaatctgaatcttatttgaaattgattcaaatgtgcatacactggaaaactacattttgtctacattatgggaaaaatagcttctgtcaaaaaattgttatgtttaactttttaaagagaaacaaatttttttgtttgccttttttggctgaataatggattaaaaccaagtctaaaatacattttcacgttgttttcattaaaaattcttgttttaaccttcctgcattttatttttagaaacttacctcaaatatttctgtttcccttttttccctctaggagtggatgtcactttggttcttgcctttgggtagtcatagtgaagaacatattcctactcaacaaggattggcttggttgattccattatgggttgatcgggacccagaggtgagtgtgaaggagaatcaagtgtattgtgtttagattaaaaaacaaatgacacggggccaggtgcggtggctcatgcctgtaatcccagcttgttgggaggctgaggtgggcagatcacgaggtcaggagattgagaccatcctggctaacacagtgaaaccccatctctactaaaaatataaaaaaattagctgggtgtggtggcaggcacctgtagtcccagctacttgggaggctgcagcaggagaatgctgtgaacttgggaggtgaagcttgcagtgagctgagattgtgccactgcactccagcctgggcaacagagcaagactccatctcaaaaaaaaaaaaaagacacaaaacatatatacatatacatagttatattatgggattattgtagtgactctaccttatgttttatttaagccctgttttagcttaggctgccataacaaaataccacagactgggtggcttagacaacagacacttcttttctcatagaagttttggaagctgaaagtccaagatcagagtgccggcatagtcaagttctggtgag

SEQ ID NO: 13853 - DNA, 572 bp, Homo sapiens
ttttcaaacgcagctggctctgaaactgctccagtgtctgaaagtgacggatgcgcctcatttctatggcctgccgtcccttgagcggaccttacgagggatggctaacctcactgcgtttccgggatggagctcacactctcctctcacaaagcctctagatatctgtgtgaagtacttgtcaggtctccttgaggtcattacttctttttatgtggagcgtggaggaaatgctatgtccttcatgggaaaaggtgttacaaagagcacaattctttgcttgcttcacttatcccatgagatgatggcccaggctgggagcttggagtggatgtcactttggttcttgcctttgggtagtcatagtgaagaacatattcctactcaacaaggattggcttggttgattccattatgggttgatcgggacccagagccctgttttagcttaggctgccataacaaaataccacagactgggtggcttagacaacagacacttcttttctcatagaagttttggaagctgaaagtccaagatcagagtgccggcatagtcaagttctggtgag

SEQ ID NO: 13854 - DNA, 6278 bp, Homo sapiens
aaggatgttatcatgcaagattttcctgctgagattttccttcaaaggccaaaaattgttcagagccttttatctctgttgaaactggcctttggagatggaaagcatcgcctggcattacagtcggtgtcctgcctgcagcagctgtgcatgtatttaagaaacagacttaactttcaccgagatccaggttttttctccaataaacacgacacagtttcccaaaattcttctttgtcttattgtcatgaagcaagaggtactcatcattcccagaatccttccccaggaagcagcagccctcggccttctgtggttgggcgcacaggccagcgacccagaggagatggccaggactgggatgcagcgtcctctagtggaagtagtagtcatgctcatgtaaactccaggatatccgttcattcacctttggatatgggacacatagatctgccagagctggaaactgaagacacattggaactacaattccagcagctcagtcttccccagttttgtgtctccattctggaatcagctgttcctctcttaagaacaggtagcagacaagtgataataagagttctggaattgcttacagaggatatgacacttattggtgaagcaatttcaacagatatctgggatgacagcagcctttttggtatagatatgaaggagaaactactcctggtgttgggagcccttggagaaaccatgtgctaccataaaagtagtatcagtttggagcagccagaggtgatgcttgtgcaccacagaatggcctttatcagcatttccctgtttgcagttcgactgctacaaacgcttctccctgttgaaaaggcaagcgagtttttatcagagcctatgtcaacagcattatttctcctttctttggacatgcctatttctttggaatatccaaatattcatgaagctgttgtggcctatttggaacagctgaattctgaaaactacagtatttataaacgaactgcagaggccgtttattcaattgaatgcacctgtaacttcctgtctgatattgggaaagagggagagaagaatctcttagaattagtggagctggcagaccaagccttgcgtagcttttcctatcatcagcatttcccgctaataaaggaaatcatcagcatttgttcaaagatctggaaatctgctcaggccagtccattactacaaggagaaagtcagaaggtgcttctccatatgttgtctcacccattgccacgagtgaaagctgaaacttaccactgctgtctggaaatcacgaaggaatgtttaggtgtccataatgtcactaaacccgtgtcttcactttgcaatggaattcattttctacttcatccaaaagttctgtatgaaatctctgtatttggcattcaagagcccgaaagtgaggtgaacactgctgccaaggccattctgttatacctgcttcagggacgattgatgatgacagcattgacctggaacaagtttattgaatctctctgtcctgtcatcccaatactacagggctatgccgacacagaagatcctctgggtaactgcattctccttctaagcaaagcaagttctgacacagaagagatgcttccgtgtactacccgattaaagtccatgctgcgacttttgctagtgaaaaagccatcggtccgttcgctagcattaaagcttttagcattccatcttaccagtgaagaaggggctgatacaaagcgtcctctaatagacgccagagttctctccagagttactgatttattcattgggaagaaacctattgaactcagactggatgacagaagagagctggttattaagttggagactgttgaaaaggtatatgaaatcttcacctcagatgatgttgatctcgttttgagaaagtcagctgctgaacagttagctgtgattatgcaaggttgtagaatgtttggtacaaccatgcctcacactcttgaggaaggttttatgtggtgatccagtcatgcgtgtttcgctctcgcaacagtcttctcttttgaccgtgttattcagagtttccttaatatttcatgaagattgtagtgtcgtgactgaagttggagcactattttgtcttctattatttgatgaagtatcgagaatggatatgtggtctgttaatccttccaataaaccttctttgccatcggtcttcagtttgcctgtttccgtttttagaaggtaccatctacctgttcatgtaattggacaccatgctgtgagtccttactccatagttttgcccttatctgctgattgtttggccttgaagccggtgtcagatatgctgagaatagcttggaacctgtcatggtatcatgggagtgataatctgttgaagcaaatgaactctgaaactaaaacgcaagaaattttagatgcattgaagttatctacagaggacatcctcactctgaagataacacacatggctagtgggctgcaggactgcctccattccattgttcaggctgcaacccacagggaagttagggctgctgtcaccaggatgagtttttatcttctgaatgacagattgtctttaaagggttgccctggtccatgtggggttaccttgaagtccttggcttggcacaccgcactaaacaggtttttacaggtgcttcctgcttgcactgaagatgagaaactgctaatagatatcatacattttttaaataaattaataaaggaacaaagaaaaaattcttcactagaacttctaaactggattctcgaattacttcttagacatagtgcaaacccactgttagacctcttggttctgacagagtcacaggcacgagaagaaacagatgatatccggactgctgtcaggcaacaacttcagaaagaactgattgctctttttgataccttgctgctcaatttcatggaagttactgacaggaaatgctcggaacttctttacgtttttcaaacgcagctggctctgaaactgctccagtgtctgaaagtgacggatgcgcctcatttctatggcctgccgtcccttgagcggaccttacgagggatggctaacctcactgcgtttccgggatggagctcacactctcctctcacaaagcctctagatatctgtgtgaagtacttgtcaggtctccttgaggtcattacttctttttatgtggagcgtggaggaaatgctatgtccttcatgggaaaaggtgttacaaagagcacaattctttgcttgcttcacttatcccatgagatgatggcccaggctgggagcttggagtggatgtcactttggttcttgcctttgggtagtcatagtgaagaacatattcctactcaacaaggattggcttggttgattccattatgggttgatcgggacccagaggtgagattcacttcactgggattaggatcagcactgaccacccttgaaacgggctgtgtggccttagcaaacagttgtcagaacatttccggtgggctctggggaactgtggtgaacattcttctggaccagtcagaatgtagtatggtgcgccgggaggcggcatttattcttcagaatctccttgtaattccaatgcctacagaaattataaaggattatacttggcagggtccctgtgttcatgatgaggactctggcctatcgctcattggaaaacctgcccttcaggctcttttatatcactgccatttttatgaacatttgaatcagatggtaaagcattgttacctaggacggtgtatgtttgatttgaatttttctgcttttgatagaaattcagaaagcaatgatttaaatggtttagatgactcattcaagttttggagggctccatctaggacaagtcaggatcgagatccaagttctctctccacctcagaaacaacggtggcaccttcattggggagtactgaatttcagccacttgtgcagtcaacaacacttctacctgaagcctcccatgaccagtttgtggctcaaggtcaccaggaaagtacatcaccacggccacctcatgattcatctctttctgctcccctgcccaaactgtgtgtttttgttactccatctcttctttcagcaatgtgcagcctcttggacaacctcttgacgattgctcccagagacactgcaaaggcttttcgacaagctcatctcatagaacttctctgtagcattgcagatgctaccctcatacagacatgtgtccaggaactcagagccctgctgccttcatcacctccagctgaacacactcaggctcaggtttcctttctcctggaatacctatcctctttgtccaggcttctgcagtcatgtttattggtggagcctgaccttgtgattcaggatgagcttgtgaaacctcttatcaccaatatcattggaattctcaccatatgtaccaaagatgtattagataaagagttaatatcagctttttatcacacatggacacatttatttaatcttctggccatgctcctgaggaaagctggtgccatcacactcccgtttgttaccgtggccctggccaagcactggacagcggcgattgatatgttctgcacatgtgcaggcttgtctgccacgtgtcctgccctgtatactgccagcttgcaattcctttctgttctcttgaccgaagaagcaaaagggcatctccaggctaagagcaaaacacatttatgctgtagtccaacagtggcttcacttcttgatgactctcaggaaaatcagaaatctctagaacaacttagtgatgtaatccttcagtgctatgaagggaaatcctccaaagatatcctgaaaagagtagctgcaaatgcattgatgtcactgctggctgtcagtagaagagcacagaaacatgctttgaaagccaatcttatagacaattgcatggagcagatgaaacacataaatgcacaactgaacctagattctctgaggcctgggaaagcagcattgaaaaaaaaggaggatggtgttattaaagagttaagcattgccatgcagctcctaagaaactgtctttatcaaaatgaggaatgtaaagaagcagctcttgaagctcaccttgtccctgtcttgcactctctctggccttggattttgatggatgattcattgatgcaaatttctctgcagctcctttgtgtctatactgcaaattttccaaatggttgcagttctctttgttggtcaagttgtggacaacaccctgttcaagctacacatagaggagccgtgagcaactctctgatgctgtgtatcctaaagttggcttcccagatgccactggagaacaccacggttcagcagatggtttttatgcttctttcaaacctggccttgtcgcatgactgtaaaggagtaattcagaagcattgccaaaaggaggaaataaacatctaagtaatctgactattctttggttgaagttactcctgaatatatcatctggagaagatgggcaacaaatgattctgaggcttgatggctgtctagacttactaacagagatgagcaaatacaagcacaagagcagccctttattgcctcttcttatctttcataatgtttgcttcagtcctgcaaataaacccaagatcctggctaatgaaaaagtcattactgtgcttgctgcctgtctggaaagtgagaatcaaaatgctcagaggattggagcagctgccctttgggctctgatttacaattatcagaaggcaaaaacagctttgaaaagcccatcagtaaaaagaagagtggatgaagcatactccttagcaaagaaaactttcccaaactcagaagcaaaccctctaaatgcctattatttgaaatgtcttgaaaacctcgtgcagctccttaattcttcctgagtgccatgggatgctacaccttgaagctgacagtcatcaacaggggagctaaagttgaagccagctgtgtgtagcagctgttacctgaagacgtgctacctctctacaaagtgttgatccccttctttcccatgagagagagaactggtgatactccaacaccgtccagttgtggcagctctccagaagtaatagcagctgacaactttctgtgccttttcctttctgttgaaaaggcatagaaagttctgggaacataaacatttttacccttttctatgccatttattttgtaaaaatcctatttaacagttatttaataaaacaatatttttagaaactaaaaa

SEQ ID NO: 13855 - DNA, 9256 bp, Homo sapiens
aagaaactgtctttatcaaaatgaggaatgtaaagtaagtagaactacttttcaaaattttaataggagtactggtattaagcagtttaatttttatgtgagataatgtagtaggaaaaatggaaagctctgacttttaaatttttagacacacagttgattggtccttaaactcagtgttaattgtcagaaatgtgtgtatctaatcattattcatcgacactgattacatttcttcgcaaacttcagcctcattctgtactcttaggtattttaaatgttttacatatggaatgaatggctggatgtgttttataaggtagattctttcaaaacgggttgtcaaaacaactcttcaaggaaataagtgaagctatctgtatctataaggaaagaaaatgaagagtttcctgcttcaaaggagaagatagttagagctgctacctagtgtggccacatccaccgagaggaagtttcttctagctctgctgactccctgtgaccatttacatggcccttctgtctaaaaatcactgagatgttttgcttcgtctgtaagcactgatgatgttttaaaccattgtatcagtactactatagaggatataatcttgtgaacactctgatttgctttgtctatagttttacaacacttttgaaatactagattgatgctttaatgcagaaatactagattattctttataaaagctggccacgaaaataaaaattttaaaaaatactaaattaaagctttaatatagaaagcaaagataaattatggaagcttttattgccttataaatttttacctgttttgctcttacttgtggtaagagcacaactggaaaaaccataccacatctggaaaatggacatgttgaacacacttactccttaagcgatgttaaaaagccagatacatgactcacaatttatatttcaaagtagtttgatggaaattaagtatttatttatacaatttattaaaattccctatatatgaatttatatgaactttttctcaagacaaaagtgccattaataaacttaatgattccttcatgcttatgatattatgcttgtgactggatgtacagtcagtatttgtgtgtaaatttaaatatataaatttcatgtgtatgtgcagttaatattcattcatgacaccttattcagggaaatactctggaatactttacatgtgggatctacctataaagatttatgaagtgctaacctggctactagttataaatattgtgctcaatttgtatcacattagccatttacaaaagtgtgatatctcaataagtcaaagcatttctgtatttctaagttgtttaataagaagtaaatccaaagaatattaagattatccttgagtataaatataatattatggaggtagggattgttaatttcaatttcagcttttatcaggtgtatggcatgttctcattattaatagttggccactattgggtaattcaccaggtcacccactgccaccccaccctgctgtttgcatatgcataacattaggggttttcatactggaaggagcatggtggctgtgaggtaaatgaattaaacagtggacaaggttagacggaggggactgtcatagtccagacaagagatgatgacaccttaacttgagcaggtagaaaggagaaggagggtagggagtaaatttgaggcattgagaagaggaggaatgtagaatgacttccaaactccagtttaagccactgcattatcatgcattaagagtgcatgatagagcagagcacaggtgtgagagacccgatattcatgcttgcacgtgctagcctcaagagtctttggggcatccaggtgaaaaatggcttgtggcctgtagattttatgggtctgggactctaaggagtgatacaagctggggatattaggagttatcaatgtgtagatggtgtttgtggtcctcactattgttgaaatttcccaagaaagtatgtaatgaaaaccaaggtcatatctttggaaaacaggaacatttaagagggggcagaaaacaactgagaagggaatactggagaaggaatttggagattgcattaggccgttcttgccttgctatgaagaaatatctgagactaggtaatttattaaagaaaagaggtttaattggctcacagttctgcagggtatagaggaagcacagtggcgtctgcttctggggaggcctcaggaaacttccaatcatgacaagaaggcaaaaggggaacaggcacatcacattactagaactggagcaagagtgagagagctggcgaggaggtaccacacacttttaaatgaccagatctcatgagatcactcactgtcttgaggaaagcaccaagccatgaggaatccgcccccaagatataaacacctcccaccaggcctcacctctagcactggggattacaattcaacatgagatttgggcagggacaaatatccagactcttatcagaaatgatccaggatagagcagcagcggggaaattaagagacatatagcaaatgccaccgtgcttaagcgttgttggcaaccacaaaagtagaagcggcctcaatagaatcatcagggcagaaaataaacggtaatgagctaaagattaaatgtgaggcagggaaattacagcaataataatgtagaagtttggtcatgaatagtggcattaataatttaggacatataagatgaaaggaaatgagtatgtttgtttctcttaacacgtaaactacttgaatacaggcacagaaatgagcaaattggggacgagttgtttaagagatagcaagaggagaactaactggtggattaagatccctgaggaggcaggaagagctgtgtttcagaacacagatggatgtatcaatctctggcaggcaagaagtggaacacctctttgtcactaccgggcagacaggaaggatgaatggatgaaaatacagataaactatgtggacagaatggcagagtagataaaggagtttgtacttaatcgtttctgtcttctctgtgaaatagtaaacaaggtcatctgctgcagatggagggccgtgtgccacagagagtggtgaacaagggaagaactttagggagagcactgggaatgacttcagtgcttacggagagtgttgaacattgggaatcacttctcttctgccacttgatgctatgtgaaatcgtatagggtgtgtgtatttatgtgcatgctcacgtgcataatcatgggtctacaaattacctcggaattcttgttcatttaaaatagatattgctgcacttaaacagctatattttatctgcaatattgtcccagggtaactgatctttgtaataaagactctgagttacttcagaatttttcaatttatcataatatttagactgaattttatatattcaaattactcaaaaactgtaatttactttgagtatatacacacatacacagagagagagaaggagagggagagagggtgggcaaagaggactcagagttgatcagaatgtttacttaaccagaaattctcacttcttggccagttcatagcatttacaggaatttattcagtgttgtgagatatcactttgctgtttaatttacatgttacacaggctattttctatgcttcctaacttagtggtacatcttaaccaccctggtgttgaagcgacgtcctgagattggtcaggctcgtggtcagggcagccatgtgtggagcccaatggggctggggcaggatgctgaagccatccacagggttctccttgggtcttatgttgatggctttctgttgttgttttgattttaatgttatattttcatatattcagactaatgctgtctttttcccttccttcaacaggaagcagctcttgaagctcaccttgtccctgtcttgcactctctctggccttggattttgatggatgattcattgatgcaaatttctctgcagctcctttgtgtctatactgcaaattttccaaatggtaataggatccaatactgcctttcaataatataccaaaatactagttttataaatgttgttaaggtggactggaaaaactaatacatattttgaagtatttctctgatttattgaggatatgatgggcaaaggcaagctttctcgtaggtattatgagagcagacagatattttagtgtgtttgttgacatgagagagtcattggcagcgcagggaatagagagggaggactggtctgattatctggcaatgggaaattgagtttagtaggaaaattgagaggataaaaattatgatgtaagacctcaaaagccacgtgaaggttagaacttctcatagattctagagcaggagactggcatgttgaaagttctcataacagttggtctggtgatacttgatatcactagggctcctctttcgctcatgcacttgatagacactttatcaagagcctgtggtgggccatgcattgtgagttctggtgagagtgatctgaaatgagataggaggacaggtcatgtagggcctcagaggccagagtagggagtttggatttttatgtgagtgtaacaggatgacattggcagttgtaagctggtgagtggcatgatttaatttgtgtttaagaaggattaggctgggtgcagtggctcatgcctgtaatgccagcactttgggagacccaggcaggcggatcacttgaagtctggagtttgagactagcctggcaaacatgaggaaaccctgtctctactaaaaacacaaaaattagccaggcatgatggtgcatgcctgtagttccagctactcaggaggctgaagcaggagaatcacttgaacccaggaagcggaggttacagtgagccgagatcacgccactatactccagcctgggcaacagagtgagactctgtctcacaaagaaaagaaaagaaaaattgccctgggtggtatgtggagaatgaatgattgggagcaagtctagaagcagggagacttgtcatggagatataatggtggcttgggcttgagtggtagctggagagattgagagaagtagacagattcagtatatagctcaaaggtagagtcaaggatacctgttgtgggaggtaggaaggaaaaaaaggtgtccggggtgaacttcatttggagaaatgagcctgagtgcacagtagtgccatttactaaaatggggaagatttaaaagaagcagacttgaagtgagaaagtagtaggaatcaagagttctgtttggtcttgttaagtctaaggtgttgatgttcactcaagtgaaaatagtaagctggagttgaattcaatggagtgtagagataagtttgaagatttcaaatgttgggaatattattagttatttattgctacaaaagaaattactctaaaatttagcatctgcaaacattaatcatttcattatgccacggcttctgtggctcaggaatctgggcgtggctaatctgggtggtcctcgctcagagtctctgcaatcatctgaagtcttgactgggatagaggatccagtgtgactatgggagcctcaattccttgctacttagggctgtctcaaacgacccagaatgagtgggctgagggcagaagttatagtctcttataatccagtctcagaagtaactgaacagcactcctagctcttgtgggtcacacataccaaccctggtacagaggcaggcgccactgggaccatcttggaggctggctaccacaggagtcattgtcatgtagattgtacttaaagccacgtggctgtttgcgattacccagggagaatgtgtagatggagaagcagaaacccatgaccaagttctgaggcacatcaacatttggagttaatcaaaagatgagaaaccagcagaaaaaaaagagaaggagcagccaatgagataacagtgcacagtcacagaaagtcagagaagggcatgctcagttgtgtggaatgctattgaaaattctgctaaagtgaggatagaaaaaatggctgttggacttagcagtattgatgttcttttggaccttgagggtaattttagtgcagtgccagaacagaaacctacttagtgtgagctgaggagagaagatgaagaagtagaggagacagcttttccaaaatgtactactcttaagaggacaaagaaatggagcaacagcaagagacagatgtggagtcaaaggaggagtttttgctcgtttttaaagatgtatgtttttaaggcatgtttattaacttaagggattgggagaatgaggtgcaggaaagagtgcaggtaagagcccagcctgagagggtaagagaggtgagagctagagcacagctgacaacagaagcggagggaaggctgagaggaaggatgtggatttaggagggctggtagacttgatgggaatgatgagaaaattcccattttgaatacttctgctttcttcatttaggagagaacactgaccactaagaatgagcaaagacaaggagtagaggtgatgtgagaagaggagaaagtgtgaagtagctgtttttagaggaaggaaagtaaacacaccagagaagcaaagtaggattgctggcagtgttaagtaccacttatggtcataaatttaagaaaataaattagaatttatggtcataatttatggtcataaatttaagatttaaattttattaaatttatggtcataaatttaagatttgactagcaagtttttgtactttcttctaacaacactcagtagcccagcaactggggtctctgaatatcaaaggttatacagagaagggactggaactcacaacagttaaggagcccatctagttactgccagatgctgttgatggcttattcctttgaataatctgccagatgctgatgatggcttattcctttgaataatctgacacctctggagctgtccatttcgatacccaactcaggttgtctccagtcagcacaaagagatataaacagaccttcaagctcttgaacttgaactgtcattgaagcatatgtgtacaggattgtccttgccttcattctgtgctgttaactttctccattccttaggtctggtgggaatgtctcctttcagtgcattttccagctccactagtatatcttttgtttgtttactcatcttttatgagtttcttttacagaatgtatttgattctgatcagtttatacttaagttggcctcctcgtatgaactttcacaagtcaattataccttaggtttatgtataatacagtcttattgatttaacattaaaatatatttctaatttttttttctccctcaataagtctcattcagttacttaatttcctgagaaacactgaaccctggaaagcctgtagatgccacttttggctcctgctatgctaagctgtatgaccttgaacaacaaactggcttttctgagctccatatctttgttgaccaaatatagaaaatagtatttgttttgtccgctttcccagggatattatgttccttatttgtatgttatgtaaaatgaaggcattagacaagttatctcccatttctaaaattctgttcctttacacaggcctttatttagatgttttctttagcaactattaaaaaccctagtatgtttattttattctttttttaaaaataaacctggtgtcttaaagtgctttagtgagataattaggccctcagtgaggacagtatatctattaggttgactgtagacaccaacattagcctccattgctaatttgcagttcacaggttaatggcctagtcattttgttagacagatatgctttgccacttagtgtcttcaaaaactaaacagggaaactgagaagacattgtgataggctgttatttttgaaggttgcagttctctttgttggtcaagttgtggacaacaccctgttcaagctacacatagaggagccgtgagcaactctctgatgctgtgtatcctaaagttggcttcccagatgccactggagaacaccacggttcagcagatggtttttatgcttctttcaaacctggccttgtcgcatgactgtaaaggagtaattcagaaggtacgcacttaaactccccacatatcttaaaagggtactcagtgaaataatctttccaatcaaaagtttacaactcaatttctaagattattatgattttgaggcattttattttaaaggattataaaagggttaagaggttcactttgtttaaagccagttgatagatgacacgtgcagaaggacaggagctagagtagagtcataccatttccttctcatttatcttcttagctttcggattgtattttatcattctcaaagatgagggttttagaaagatagccgtcttacatttattggaaataataaaagtaatatattggtctttaaacagaccaaattgggcagtaacaatttcagtttaatttcattgacaaaatggtttatgaaatcacagcccacttcccccagttagacttaacttccttatggcatgttaagcaattttatgagttctctaggattccagttcccaatctagacttctcatcactgattttaacttaaggtaatttaaaagggatgtaatgagttaaataaattctagtacacatgtgcacttatattctgtatttagatgtgtataaacagaatccctaattgggaaaatcccttcaaatttgaatgtaatcagattatatactacttactagtattgtaatttgagtgtttccatttcttttacttgaaggccaagataaattgcagaagttgagagcatttataagaattgagtctccttttcctctactgtttcttctccctgaactcctcagaagatactttgttatcaccacataaatagaaagttcggtctttctaaggaaatggaaagatcaatcttaccaaggaaagatgttttcagtggcacgttggagccagcctcctactgactcatgagtgtcatcttaaatttgcaggaattttataaaaattccagttgatgttacattgttattttgaaatcagccacagtgggcatatcacaccacgtaattcagcgaactgtacaaatcttggatcttttctaccctcaccacaatcagttgtttatttaccagcacatggctggatattttcttcatgtatatgttcatgtatgtcatatat

SEQ ID NO: 13856 - DNA, 783 bp, Homo sapiens
aagaaactgtctttatcaaaatgaggaatgtaaagaagcagctcttgaagctcaccttgtccctgtcttgcactctctctggccttggattttgatggatgattcattgatgcaaatttctctgcagctcctttgtgtctatactgcaaattttccaaatggttgcagttctctttgttggtcaagttgtggacaacaccctgttcaagctacacatagaggagccgtgagcaactctctgatgctgtgtatcctaaagttggcttcccagatgccactggagaacaccacggttcagcagatggtttttatgcttctttcaaacctggccttgtcgcatgactgtaaaggagtaattcagaaggccaagataaattgcagaagttgagagcatttataagaattgagtctccttttcctctactgtttcttctccctgaactcctcagaagatactttgttatcaccacataaatagaaagttcggtctttctaaggaaatggaaagatcaatcttaccaaggaaagatgttttcagtggcacgttggagccagcctcctactgactcatgagtgtcatcttaaatttgcaggaattttataaaaattccagttgatgttacattgttattttgaaatcagccacagtgggcatatcacaccacgtaattcagcgaactgtacaaatcttggatcttttctaccctcaccacaatcagttgtttatttaccagcacatggctggatattttcttcatgtatatgttcatgtatgtcatatat

SEQ ID NO: 13857 - DNA, 4801 bp, Homo sapiens
gagatggtcctggcagggctcatcaggaaactcggtcatcagctggccgagatcagggagcgcgctctcaagagtattctctgcaagattgagcacaacttaatctgctacgctgatctcattcaggagaggcaactttttcttcatttgctggaatggttcaatttcccgtccgttccgatgaaggaagaggttctgaacctgttaagcagattggttaagtatcccccagcagtccaacatttggttgacgttggtgcagtagagttcttatctaagcttcggtctaatgtggagccaaatctgcaggctgaaattgatggcattctggatggactttttcttcttccttcggaagttcctgcactatcttctgcctcataccaaaccaatcaaactgaattgtcaaaaaaccctgaaatcttaacaggatattttccccaagacaaaagtaatttccagcagatggaagtgccgccacgaccagtggtaaatcagactgtgaagtgcttgaagttttctacatttccttggctacccctgaccaccacagacagacatgtcctctcctctaatgaaagctctttaagaagtagtaaccacactttaatctggaacacctgtgaactattgaaggatgttatcatgcaagattttcctgctgagattttccttcaaaggccaaaaattgttcagagccttttatctctgttgaaactggcctttggagatggaaagcatcgcctggcattacagtcggtgtcctgcctgcagcagctgtgcatgtatttaagaaacagacttaactttcaccgagatccaggttttttctccaataaacacgacacagtttcccaaaattcttctttgtcttattgtcatgaagcaagaggtactcatcattcccagaatccttccccaggaagcagcagccctcggccttctgtggttgggcgcacaggccagcgacccagaggagatggccaggactgggatgcagcgtcctctagtggaagtagtagtcatgctcatgtaaactccaggatatccgttcattcacctttggatatgggacacatagatctgccagagctggaaactgaagacacattggaactacaattccagcagctcagtcttccccagttttgtgtctccattctggaatcagctgttcctctcttaagaacaggtagcagacaagtgataataagagttctggaattgcttacagaggatatgacacttattggtgaagcaatttcaacagatatctgggatgacagcagcctttttggtatagatatgaaggagaaactactcctggtgttgggagcccttggagaaaccatgtgctaccataaaagtagtatcagtttggagcagccagaggtgatgcttgtgcaccacagaatggcctttatcagcatttccctgtttgcagttcgactgctacaaacgcttctccctgttgaaaaggcaagcgagtttttatcagagcctatgtcaacagcattatttctcctttctttggacatgcctatttctttggaatatccaaatattcatgaagctgttgtggcctatttggaacagctgaattctgaaaactacagtatttataaacgaactgcagaggccgtttattcaattgaatgcacctgtaacttcctgtctgatattgggaaagagggagagaagaatctcttagaattagtggagctggcagaccaagccttgcgtagcttttcctatcatcagcatttcccgctaataaaggaaatcatcagcatttgttcaaagatctggaaatctgctcaggccagtccattactacaaggagaaagtcagaaggtgcttctccatatgttgtctcacccattgccacgagtgaaagctgaaacttaccactgctgtctggaaatcacgaaggaatgtttaggtgtccataatgtcactaaacccgtgtcttcactttgcaatggaattcattttctacttcatccaaaagttctgtatgaaatctctgtatttggcattcaagagcccgaaagtgaggtgtgtcaggtgacctagcgggacatctcatttgactggtttatcgggtctgtgttgttgagcaggtgaacactgctgccaaggccattctgttatacctgcttcagggacgattgatgatgacagcattgacctggaacaagtttattgaatctctctgtcctgtcatcccaatactacagggctatgccgacacagaagatcctctgggtaactgcattctccttctaagcaaagcaagttctgacacagaagagatgcttccgtgtactacccgattaaagtccatgctgcgacttttgctagtgaaaaagccatcggtccgttcgctagcattaaagcttttagcattccatcttaccagtgaagaaggggctgatacaaagcgtcctctaatagacgccagagttctctccagagttactgatttattcattgggaagaaacctattgaactcagactggatgacagaagagagctggttattaagttggagactgttgaaaaggtatatgaaatcttcacctcagatgatgttgatctcgttttgagaaagtcagctgctgaacagttagctgtgattatgcaagatattaaaatgcatgctgtggtgaaaaagttatgcttaattgacaaaataattgagtatttaaatgaatgtgtgagtcaagatggcaaggttgtagaatgtttggtacaaccatgcctcacactcttgaggaaggttttatgtggtgatccagtcatgcgtgtttcgctctcgcaacagtcttctcttttgaccgtgttattcagagtttccttaatatttcatgaagattgtagtgtcgtgactgaagttggagcactattttgtcttctattatttgatgaagtatcgagaatggatatgtggtctgttaatccttccaataaaccttctttgccatcggtcttcagtttgcctgtttccgtttttagaaggtaccatctacctgttcatgtaattggacaccatgctgtgagtccttactccatagttttgcccttatctgctgattgtttggccttgaagccggtgtcagatatgctgagaatagcttggaacctgtcatggtatcatgggagtgataatctgttgaagcaaatgaactctgaaactaaaacgcaagaaattttagatgcattgaagttatctacagaggacatcctcactctgaagataacacacatggctagtgggctgcaggactgcctccattccattgttcaggctgcaacccacagggaagttagggctgctgtcaccaggatgagtttttatcttctgaatgacagattgtctttaaagggttgccctggtccatgtggggttaccttgaagtccttggcttggcacaccgcactaaacaggtttttacaggtgcttcctgcttgcactgaagatgagaaactgctaatagatatcatacattttttaaataaattaataaaggaacaaagaaaaaattcttcactagaacttctaaactggattctcgaattacttcttagacatagtgcaaacccactgttagacctcttggttctgacagagtcacaggcacgagaagaaacagatgatatccggactgctgtcaggcaacaacttcagaaagaactgattgctctttttgataccttgctgctcaatttcatggaagttactgacaggaaatgctcggaacttctttacgtttttcaaacgcagctggctctgaaactgctccagtgtctgaaagtgacggatgcgcctcatttctatggcctgccgtcccttgagcggaccttacgagggatggctaacctcactgcgtttccgggatggagctcacactctcctctcacaaagcctctagatatctgtgtgaagtacttgtcaggtctccttgaggtcattacttctttttatgtggagcgtggaggaaatgctatgtccttcatgggaaaaggtgttacaaagagcacaattctttgcttgcttcacttatcccatgagatgatggcccaggctgggagcttggagtggatgtcactttggttcttgcctttgggtagtcatagtgaagaacatattcctactcaacaaggattggcttggttgattccattatgggttgatcgggacccagaggtgagattcacttcactgggattaggatcagcactgaccacccttgaaacgggctgtgtggccttagcaaacagttgtcagaacatttccggtgggctctggggaactgtggtgaacattcttctggaccagtcagaatgtagtatggtgcgccgggaggcggcatttattcttcagaatctccttgtaattccaatgcctacagaaattataaaggattatacttggcagggtccctgtgttcatgatgaggactctggcctatcgctcattggaaaacctgcccttcaggctcttttatatcactgccatttttatgaacatttgaatcagatggtaaagcattgttacctaggacggtgtatgtttgatttgaatttttctgcttttgatagaaattcagaaagcaatgatttaaatggtttagatgactcattcaagttttggagggctccatctaggacaagtcaggatcgagatccaagttctctctccacctcagaaacaacggtggcaccttcattggggagtactgaatttcagccacttgtgcagtcaacaacacttctacctgaagcctcccatgacca

SEQ ID NO: 13858 - DNA, 18947 bp, Homo sapiens
tatgctgagaatagcttggaacctgtcatggtatcatgggagtgataatctgttgaagcaaatgaactctgaaactaaaacgcaagagtaagctcttatattagtttaaaaagcatttgcaattaattaattgtaattaattagttaagttttactttttccttaggtccagtagctttttcccttggtatcatctgattctgctttttaacagttataatttttactttcttttaaatattacatgtgtttattacttttaacaatctatcatatgggaaaactttaaatgaaaaagcattttactctgtactgttttagaggttaaagtctgatttgttcgtagatatgaatcactaggaaaagggtcctggattagaacaaaatctcagtaagtatatgcatgagtgttatcattagtgtgatggtgattacttttgaatatcttaatattctaatctgtctgtcttaagtgaataaaaatttttataaggaggaaaagtcaatataaacatttgggatgccaatgtaaaatcctaatattgacagatatgtatcagtttttcttctggctgtaagtcaaccttttgttaaaagaaaatgaagataaaacagcttttgggagagtttataatagaaataagtgtgagcttttatttaaatagctttatgttcctccttcattttttttctttttgtctagaattttagatgcattgaagttatctacagaggacatcctcactctgaagataacacacatggctagtgggctgcaggactgcctccattccattgttcaggctgcaacccacagggaagttagggctgctgtcaccaggatgagtttttatcttctgaatgacagattgtctttaaagggttgccctggtccatgtggggttaccttgaagtccttggcttggcacaccgcactaaacaggtcagtgtaaggtcaaggctgccagtttcaaagacctggattgcattgtattgtgttcatctcctaacctttgaagataagagtctatgcccttactgctgctatcatagaaagaaaaactccaggatttttatcatctgtaataatagccaaagagaaatttttaatttagttattgcattgttgaagggattattaataaacttgtaacaatttattcttagaaaattttacctcacaaaagcaaataattaggataagacatggatgaaacaaattgaatgtttatttctatccatgttataaatgagttgagacatcagtgaattgattaatagctgtgatacacctgccacaggctgttttgttttgcttttgttttgttcttaagtaaattatatcatttttctttttactctcaatttcatgaagttgattgccatgtggcggtcctttatagcagttaattgagaaggctctagcttgtcaatttaacatgcttaacttgtagcagatggttgcatttgcaacaagactgataagcaaccactgcaagcaggttttcattttattcttcatgtgactttagtataaaatgtataactttattatttaacataaaatgtgcagtttttaagctgctaggttaaatgagtttccaaaatatgaattcctttattagtttagctttaaaaattagtttatctgattaggctttccagtggtgtgctggtgcccactaatgcagccttgtgagagagctgatggttgaattttcaggatttttgtaaggtgattgttaaacacagccattcttaattatataaacttacaattaaataaattatatgaagacaaaaggtaatgaatatgcaaacatcactttctaattatgtggcaacattttactgttatctttgttcttgaggttatgcatacatatgcactacaggggtatgtattttatggaaataactacaatggagtaccactgtgcatctcttcacaacttcatgttacatggtagctccacattgtctacagtagtatatttacaccatggaaattgacaaacacaataagtcagcactctcagttacatatttatcagcacactcccgcatttaaacagtctcgccagttgaagaatgcataaatccttcactttaaataaatgtaatatgtccctatttgtcaaaagaaattttaacataaaagctgattgaattcattgcactaagttttctttctcttgtgaattaaaaccatagaaatagtatgcaataccacattacaggaaagactctcaaactgtgggtcagtggaagcctttagagtatttcaaattgcccaatagcagtaactgtatgtgagcatcacattttttatggttagtttcctcaggactagtgtaagtggagagtatagactgtgtatatgtttaatatatacacacatgcatatataatattcatcttgtatttggtttttaggcctgtgtttgatcatggcaacacagacactactgcctaatttataaatattcatgtatttctgctgtattatgtttcactaaggaatgtatcaaaaatatatatcacagaatccaccttttttcatgaaaactttttaaaaactttacttccagcaatgtatgtactaatgaggctttgggaaactttagttttgctttcattcagtttaatgatagaaaggaacattatctttttgactgattatctaagatgaaccaacagcttaaagggtgcttggagatagaagattcccataaatcatggctgtataaagtattgagatattgagaacatttttataagcttagtttaatatttttaaaatacagctatttcaaattatatcattctagacaaaacaaaatatagagaagcatgttcatacctgtgtgaatggttttttattgtattttaaaaataatgttattttttacacattttccatgtcagtaaatatactttgaggctaatttttcaaatatatgatatatccaaatgaatgttccgcaaaagaggtccttttaggagtgagtgtgtatgttagaataattctggctttgctcagatattttgaaattgtcctctcaggtcatttaaacagcagatgtaaggaagtcttattatattttgaagttatatttaattttttactaaaaaatgatattagcaaactcaactatccagagaagggtaaaaatgatttttacatgtataccgaaatgaacaccaccctaaaccatgactatttatcactattaacaaaagtatatttcagtttgacaaaaaacatggtttctaaaatctttttacttacggtactgtggcttctaaacataactttccaagatgattattttaacagcccaacattaatttatgtgtatgtttttatatgtgtatgctaacacacaagcatacaattataatctaatatcattttggaaacttattttaagaaaacagatgatagtcatggtttagtaggattacaagttgtcagaggtatctagagtcttctttcaactagtttctgttgagtttgcatgtttaatgcctctctactcctttcctactggaagtcctattgctactgtttttctccatttttcaccagactgtagactgactagcgaattggtttttctgcttttaaccttatgccactcatttatgttgcttcctgaatgatccttctgaaatacatgtcacctgtgggttctcttccatggtgtgctagatattaatagaattccaaccccttagcatgctgtagaaagttctttttgatctagctcttgcttaccttttcagctacagtttcctcctctctctctaacatatgctgtgtttctatgaagtgcaaatattggggttttatgaaactgcttgatattttagggcatacacttctgttttatacatccttgcttttacatagttaactccttggctgccttgtgaatatctactcttccttgagctccagggtcttcttactctgtgatgtatgtggaattctagttaccctgattgtcatgtggctttcctgcattacttctacagttgtttaaatatttgttttctcatgtgccttgggtttattacattcctttttatatccctcacatatcgcataagtcatagtatacagttggccatgcagcctcagcgtgaacacctcctttgaaggatattcattctgtttttgcgctgtgattattcgtaagttttttgttcttttagactgtacctgatcatttctacctgttattctgtcctttaaactcacagaataaataatgtcttcacatgtgacagctcttcatttaaacataactataatttcttctctattccccccaccctgctttaaatgatttgtttttttttttagatagactttaaaagccacagtgtccagacttctcatttgttcatgctattttacaagggtattgtgtttcttaggactctccctgagatctggacatgataccttatatgggtgtggtgctgtggcatggggtgaataggaagaaaggggctactgcctttcttttcctactgcttttccatcattcaacaaacatttattgatcacctactaggtgtcactcttgtaggaaatatagcagtgggcaaaactgatagggtcctgctctcatggaacttggaattaagacagctaaaagtataatcaaaagtagaaatgcttccaagcagactattaggaaactgcattagaggagcaccctatccctcttcagtagagagaaagtggttcagagaatgaagcttaagccaaggcataacaggtagaaggatgttaaaagtctatgggattggaagccgaaaagataccaggcacacagagaaacaaataccacatgatctgtcttatatatggaatctaaaaaagtcgaattcaaagaagtagagtagaattgttaccagaggcaagtggcaggtggatatgggtagggaaaagggagacgttgctgagaggttacaaaattccagttagacaagaggaatgagttctggtgatctcttacagcatagtgactatagttaataataatatatgtttcaaaatagctaaaagaatagatgttaaatgttctcaccacagagaaataagtatttgaggtgattggtatgttaattagcctgattggatcattccacaatgtatacatgtgtcagaacaccacattgtatcctaaagatacatacaattattatttgtcagttaaaaataaaacaaataaatggaatatagtttggtgcatgttatgtgacagaaatttgatactttgaatccgtaaatggatggtcagttgactcacaaccacttgcagaatatattatttctcctctagactaaaatgccatattcaacaaatattatacaaattaattttttttttaaatgccaggcaaagggataggccctgagttaggaaagagtgtcttgtgtcttcaagaggaattgaaaagaggatagtacacttagatttaggggatatgagggtggttataaaatggggttacagaggtgatattttaatgttacactggatatcatagaagacttcttataatctttgtgattgttaaatcataaatctcccaaagatctatggttgttagaatcacctctcaattttcataatccggcacttgccatcctactcagctgaatgtcattttggggatgtgagaattttaagtaaggaaaaataataatgagacaaacaccacattactaagaaatacagcattatatatccctggtgttggactgcttagtttagtattcctgttttaaaacttgctagccgtgtgactgtggaaaaacgacttaaccatatttttgcttgggtcttcttgtctttgaaatagaggtgcctacttcataatgttgttatgaagtttgacagaaaccctgctgttagaacataggctggcacaaggttggtgctccataaatgctgagtattaagattcgtattattgtcactcttattaacattttgatgcaatggctttagatttataaaaaataaaacattacagataaaattggatctcatatctcttgctgattgctttttaaaaaaaacgatttccaaactacttctcccttttaaataaaagttttattgtctactaatcttttagctctcttaaaccagtttttttttttaaagaaatcttagaaaattggctcatatccttttgctctgaacttaaaaagaaatttcatcctaagtctaccttcagtgttttccttgcctgttacaaactctagtagcgtccttgcaggcctttttttccccctcactttattaccttattttttcgagttggtcagaattaggtttgaagtactaattcttctcatcagtgaaacatgacattcccagtatgaaaagcaagtttcactgggcggttattagagtcagtgtttttccccttggtatttttttggtactttttctgaatttgttatttttctcttatgatatttgtcacttctagttattttagttacttgtccacatgttttttccactataagctcatgttcttgaaggcagatacccagtttgtttcaactttgcattttccaaagcatttaaaacagtgtctcataaaatagcatcctcacaagacatctgttaagtccacatatctatgatgaacagtggtattgtgtattttaaagcgccagaaaccatgattattgtcttttcattataggtttttacaggtgcttcctgcttgcactgaagatgagaaactgctaatagatatcatacattttttaaataaattaataaaggaacaaagaaaaaattcttcactagaacttctaaactggattctcgaattacttcttagacatgtaagtggtgttaaggaatttggattttaagtttgggaaataacttatttgtagaaatcattaacattatattatggaaaaggataattttatattgtctatgcttggtaaagtagtcttcatgtaatgaatggctcataacaacatggctttcctgatacgattgtgaatgtgtttattaaaattctgtacagtgaatgggacctacagtcttgtgtttaataaaacctgttctgcatgtgaactttctgctgcaactgtatttttaagtggggatttcagttcaggtggcaggggacagggtggatgtccagataggcatgttgagagttagctaacaaagccagatggaggcaggagggggtatagtgatggtgcagttataaagataaagtgtgttcaggccttaaataacggttactggaatatttacccttctagcccccactactgtcagatttttagctcttctaaaaattctaaattttttttttttattttttttgagacggcgtctcgccctgtcacccaggctggaatgcaatggtgcgatcttggctcactgcaacctctgcctcctgggttcaaatgattctcctgcctcagcctcctgagtagctgggattacaggtgcctgccaccacgcccagctaatttttgtatttttagtagagacagggtttcaccatgttggccaggctcgtcttgaactccggacctcaggtgatccgcccaccttggcctctcaaagtgctgggattacaggcgtgagccaccgtgcctggctctaaaatttttctaaatagctattctaaaaattttggctattcagatttcttattctaagaagcgtgtgaagaacccaagaagccaggtccctgttgttggtctatctgtctctttatgtatttatttgcaaataccgtatgaatttactcaacttagctaagataaagctttacacaaataagaagaaaaacaaaacaaaactagaaaagagggcctaaactgatataggacatagtggatcttataaggcaaatatgtttcattatatattaacacatttgcgaaacttagagataattttatgtaaaaatatgaattactgtgttgtcagaaatgctaactgatatgaatgtttgtgtgtatataaaacttatttagaggtttattatcgtcttaggctgttttctgttgtttttaacataatatcagaagctgggtaatttataaaaaacaaaatttatttcttacagttatggggtgcaggaagtccaggtttaagagggcatatctggtgagagccttcttgcagtggggactctctgaagagtcccgaggtgatgcagggtatatgtggtgagggggctgagcatgctgatgtgctatctcaggtttttctcttcttacaaagccatcagttccccttccatgataacccattaatccactatccatgaatggattagtctattcatgagggtagggccttcatgatccagtcacctccaaaggccccacctctcaatactgttactttggggattaaatttcaacatgaattttggagggaatgttcaaaccatagtaattatcttttcctttattgtagattggtgaaggtagggactgttttgttcattattgcatacccagcatttattatagtgccttgcacatagtgagctctcaataaacatttattaactcagtaataagctatgtagttaattacaagaagcacacaaaaccttaattttatcactagttaagatttaacaaaaatggaaaccatgtattactttcaaggttacttatatatgcaagtatatttatagactgaatttctagaattgtaattgctgagtcaaattgtagaggtgcgtgtgtgctgaggtttttgtggttttataaatagataacttattttgaattagatggagattttttcatattcggtcttttcatgaattgtatcttgatgtccttgctggttctccgccacaattgggttgttagtctcctttcatttcttctttcctgtcctttcttttcctcccttcccttctcccttccctttctcctttgctttttccttccattttcctcttccctcccctcccctttccttggagcgtgatttcattctggtacctgcaacttggacattagtgtagagatctttcaccttttgattaaatttattcctaaatatcttaattttttttggtagctattttaaatgaggtttttttttgggggggcgcggttactgtatagaaatgctactgattttttataagttgattttgtatcctgcaactttattgaattcatttttaagatcaaagttttttggtggagtctaggtttttctagatttaagattatatcatcagcatagagggacagcttaacttgccttttttctaatgtggatgccttttatttctttctatatactaattgctctggctaggatttccagtaccatattgaatagacatggtgagagtagacatccttgtcttgttcctgatcttagagaaaaagctttaaacttttcaccattgagaatgatgttagctgtgggtttttcatatatggcctttattgtgttgggattccttttctacttaatttattgagagtttttattatgaaaggatgttgaattttgtcaaatgctttttctgcatctgttggtataatcatgtggtttttgttcttaattctgttaatttggtgtatcacatttacgcatttgtgtatgttgaaccatccttgcatccctggaatgaattccacttgattatagtgagtgatctttttattgtgctcttggtttcagtttgccagtatttggtaaaggattttttatatctgtgtttatcagggatattagcctgtaattttcttttcttgtagttcccacgtctggctttggtatcagtgtaatgctgccgtcataaagtgagtttggaagtattccttcttcatttggttttaggagtacagagattagtattaattctttaaatgtttggtggaattcagcagtgaagccatcaatcaggtcttgggcttttttttggtgaaagactttgcattactgatttaatctccttattattggtctgttcagattttctgtttcttcatgattccatcttggtagctctatgtgtctagaattttttccacttggttgtccaatttgttgacatgaaattgttcataatagtctcttacgattccttgtgtttctgtggtatctgttgtaatgtcttcccttttcgtttctcattttgtcttctttttttattagtctagctaaaggtttgtcaattttgttcatcttttcaaaatctcaattcttgattctgttactgttttctattgtttttccagtttctatttcatttgtatctgcccttatcttcattgttttctttttactaagttttggcttcatttatgcttctttttctagttccttgaggttgtttacttgatatctttctttttgacatagatgtttattgttatgtatgtccttcttagacctgcttttgctgtatcccataagttttggttggtttggtgtccatttttgtttgtctcatgatattttaaaatttcccttttagctttttctttgacccactgattgttcaggagcatgttgcttaatttttatgtatatgtgaatactccagaattccttcttttggtgacttctagttttttatcactatggtcagaaatgatattagatatgatttcagtcttgttatatttgttaagacttgtaacaccatacatgtactgttaattttgtagtatgtcataaggtttatgtatattttataatttattcatagttatgaaattaaaattaaattcctacaagactctagatgattgtactataattttaatgcagtttttgaaaaggatttttggtacagttacatttacttatttggttttgtatggtattaaacctttcttcggaaagcttctactttatctcatatattatcaccacaagtgttataaataatactacttttaagagtgcacaaaagtgaacttaagtgttcactatcagttgggtttactccctaaatattatgctacaagataaattaatatatgttatataactaccaatgtttaggataaagggaacctggaaatagaaaatcaagtaccttttaaagtttatcctttgaagtgagtaaaataagtgagaaatgatttaagaagctcagtaaaataacatttccaagtaaattgctttgaatgtatggacatacatgaaaagatatacaaaagttgtggttgcaaaaacaaaattaggcagatatgaacgcctgattagtcagaagaatgctaagaggaagtgaaaagaaaaatcagctaacttcccgagggaagatttaggaactttctcttgtgaaatttttttccatgtgttttatcaagacattcacttattacaaacatattgtaattcttaggcaatttaggagtttattgcacctctaatctgtttttaatatgatattttgtttatagtaacctagaagtgctgaatttgaatacctttctttttggaatgcatttttttgatggaagttcacaaatgtggggctgttagtttttttcttcttttggtgaagctcagcagaactacacagcatatatattttccttggctggctttcccgtaacgggctcaatgtgcactcagacattattgagggtcttgcagttacttttggcatagcttgctgatggatgtaaagttggatatgatgagtggtaactgtgtgtgtaaacaaaatgagccatcattatagaaatggttgccttttagaggtcaacagtgacaaaataatggcccaagtagttggtttaaaattaggattgaatcctaacgtctaaagacaaaaacttcagatatgattaagcacttgacatctgtaggcatcagtagagacatcttattctactctattgtacttgagaaatggtaattcaccctatattttacaagtggtattgctgaggttcactgaatttcagtgttaacatgtaaatcaaaggtgaaaagagaaaaaaaaacttcagtaatcttcaagtggaagcaagttattaataggatgagattctttgggagaatcttaatttttaggtatacacatactgtttcagtatattcatgtattaatagtagcttctacttaatttttatcagcatatcagaattaataattcctaataataaaattgttttacaagatggagtttgcgtcttggtataaacagtttgttcattttgtcagtagttttgggagtcagaaggcacgtgaatgtgagtcagcttttggatatttagggctcagaacattatagaaaatttatttatttttatgatttactaaatgtgtatttcgattcttttattcatgtatgaaacataaaagttgcagttatgtcttattcaatcttaatttatccaaagacatatattgcttaagataaaagaaaaagttgggaaaaaaactatttagatgttaaaatactgtaaaataagagcaaaatgtcactactagtttccaaaagctctcagttatattatttataattgtatatatctctatatactataagcaatttagaggtttctttacatattttcatttcttttccctaaagagaatgcagttaattttgagttgagctcttttaggtgaaggattttataagaacaatagttacattttgattgtatctctttttgtatgtttttacatgcactagtgatgtgacactgtgctgaggatggaatattaactagctttggagtaagatgcttcttgctctgcccttgtctgtctaagacttagacaattatttaacctctttataaatctatgttcccatctgtaaaacaggaatgaaaatgcaaatcttctagtttattcaaaaagtcaaatgaaatcttactatcttttttttttagcacagtgcctgaggcatcatagatgattaataaatatcccatatatctattaatgcttctgattaatgtaacgttttcttttgtcaatattattagaaataatcctcttatattcctttatctattttttttttagttgggaaaagaggaaaaactttagaaagaactagtatttgtttactagcctatcaaggtggcaaagattattgcagtaataatccacatagcactggcttgggtgctgtgggtcttttcatgtcctgtgtaattgtatgtattggtacattttttacagggacaatttggcaatatatatcaaaaaattaaaactactataatattttgatttagtaattttattgcagaattcatacataagataaaatccaacttgagtacactgtgtgttgcagcttagtgaaattatgcatcattgattatccaggagttagtgtggtaaatccttattgttgaaaaacaatcagatattaaactaatgtttttgcagaaatattgttaataacgggaagtaggaaaaaatggttacagtagtgatttttttcacttgatacgggtttgtgaaaaatgtactgttttaattctgtttatattctcagaaacaaaaaggagagttatatatcaatatataatagtggcaatttctgtgtggcatgattatgtgtggttttgtttttctcgtcctttttttctattttatatgataaatatgtttttcttttgttgagaatatattaaacatcttttgaatttagaacatctctactaatgcagtaaaggcccacacctactagttaggtaatatagctcttactagaacttgcttagcaaccaaaccctttataggaaacaatatatagttcaattagtaaatacattttttacaaatttcattttttagagtgcaaacccactgttagacctcttggttctgacagagtcacaggcacgagaagaaacagatgatatccggactgctgtcaggcaacaacttcagaaagaactgattgctctttttgataccttgctgctcaatttcatggaagttactgacaggtaccatttgtaatattgcaggtttaggtgcatttatatagaacccaagttttctttgattttcaaagttttactttgtacttctttcaaattaagaaatacttctttcaaatacttaaataataatcagttatagtgttctgtttgtttttgtttcagtttaatctgttacagcctgattgtacctgcttggtctctttcactacacacatgcactcacatatgcacacacacagttttgttctctagggtttaattcctggttctctcttaattatctacaaatctacttgagcagtcatacctatgcctatgactttatgattatctttacactgatgactttcaaatacatatctctagttatgaattctgttttttaaaaataaaaatattaagatgaaagtcactattttaaccattttaaaatgtacatttgaatggttttagtatatccgcaatgtttgcaactgtcaccactacctaattccagaactttatcatcaccccaagagaagccttgtatccatgaaaaagtctctccctattcacacattcctctgggccctggcagccactagtcttctttctatgtctgtggatttgcctattctggatatatcacataaatgaaatcaaacaataatgtgacctttagcgtctagcttcttcacttagcatcatgtttccaagctccttgcatactgtagcaaatatcactacttctttctatgactgaataatattctatttatagatatgccatgttttgtttatccattcattcattggtggacatttgatctgtttctaccttttggctattatgaatagtgttgctgtaaacactcatatacagatttttgtgtggacatgtgtttcagttctcttgagtatataattaggagtggaattgttggttcatatggtaactgtaatggtaactctatgtttgacttttcaaggaaatgccaagctgttttccacagcagctataccattttacattcccaccagcaatgtatgagtgtttcattttcttcatatcctcaccaacacctgttattatagcatcctaatgggtgtagactggtatcattttggtttttatttgcatttccccaatgaaaaataattttgagcatcttctcatgttcttatggctatttgtgtatcttcttcggagaaatacctattcaacatctttgaggatttagtatcagtgtgcatcagggatattggcctgaaattttccttttttgttttgttttgttttttgctttaaatatgtcccagagattctggtacattgtgtcttcgttctcattgatttcaaagaacatctttatttctgccttcatttcgttatttgctcagtagtcatttaggagcaggttgttcggtttccatatagttgtgcggtttggagtgagtttcttaatcctgagttccagtttgattgcactgtggtttgaaagactgtttgttatgatttgcgttcttttgcatttgctgaggagtgttttacttccaattatgtggtcaattttagaataagtgcgatgaagtgctaagaagaatgtatattctgttgatttggggtgaagagttctgtagatgcctattaggtccgcttggtcaagagctgagttcaagtcctgaatatccttgttaattttctgtcttgttgatctgtctaatattggtagtggggtgttaaaatctcccactgttattgtgtggtagtctaagtctctttgtaggtctctaagaacttgctttatgaatctgggtgctcctgtattgggtgcatatatatttaggatagttagctcttcttgctgtattgatccctttatcattatgtagtgcccttctttttctcttttgatctttgttggttttaagtcttttgtatcagagataaggatggtagctcttgcttttttttttttttttttgctttccatttgcttgataaatcatcctccatccctttattttgagcccatgtgtgttttttgcatgtgagatgggtctcctgaatatagcacactgataggtcttgactctttatccaatttgccagtctgtgtcttttaattgtggcatttagcccgtttacatttaaggttaatattgttatgtgtgaatttgatcctgtcattatgatgctagctggttgttttgcccattagttgatgcagtttcttcatagcgtcgatgttctttacaatttggtatgcttttgcagtggctggtaccggtttttcctttccatatttagtgcttccttcaagagctcttgtaaggcaggcctggtggtgacaaaatctctcagcatttgcttgtctgtaaaagattttatttctcctttgcttatgaagcttagtttggctggatatgaaattctgggttgaaaattgttttctttagaaaggttgaatattggcccccactctcttctggcttgtaggtttctgctgagagatctgctgttagtctgatgggcttccctttgtgggtaacctgatctttctctctggctgcccttaacattttttccttcatttaatctttggtaaatctgatgattatgtgtcttgatgattatgcattcttgaggagtatctttgtggtggtctctgtatttcctgaattggaatgttggcctgtcttgctagattggggaagttcttctggataatatcctgcagagtgttttccaagttggttccattctctctgtcactttcaggtacaccaatcgaacatagatttggtcttttcacatagtcccatatttcttggagcctttgtttgttcctttttattcttttttctctaatcttgtcttcacattttatttcattaatttgatcttctatcactgatatcctttcttggtgaccttcggttgggatctttgagtggacgtgctgttcctttctgtttgttagttttccttctgacaggcccatgtgctgccggtctgctggagtttgctagaggtccactctcgaccctgtttgcctaggtatcgccagcggaggctgcagaacagcaaagattgctgcctgatctttcctctggaagcttcgttccagaggggcacctgccagatgccagccagagctcttctgtatcaagtgtcggttggcccctactaggaggtgtctccccgtcaggatacacgggggtcagggacccacttgaggaggcagtctgacccttagcagagcttgatcggtgtgctgggaggtccactgctctcttcagagtcgtcaggcagggatgtttaaatctgatgaagttgcgcccacagcctcccctttctccaggtgctctgtcccagggagatgggggttttatctataagtccctgtctggggttgctgccactttttcagagatgccctgcccagacaagggaaatctggcaatctggccatggcagccttgttgagctgcagtgggctctgcccagttcgaacttcccagtggcttagtttacactgtgagtgtaaaactgcctactcaagcctcggcaatggcggacgcccgtcccctcaccaagctctagcgtcccaggtcaatctcagactgctgctgtgctggcaacgagaatttcaagccagtgaatcttagtttgctgggctccgtgggagtgggacctgctgagccagaccacttggctccctggcttcagcacccctttccagcggagtgaacacttctgtctcgctgctgttccaggcgccactggggtatgggaaaaaagaactactgcagcttgtttggtgtctgcccaaatggccgcccagttttgtgcttgaaacctagggctctggtagggtaggcaaccgagggaatctcctggtttgtaggttgcgaaaaccgtgggacaagcgcagtatctgtgcaggagttcctcaggctcagtctgtcacggcttcccttgggtggtggagaaaattccccgaccccttgcgcttcccaggtgaggcgatgctccaccctgcttcagcttgccctctgtgccctgcacccactgtccaaccagtcccagtgagatgaaccgggtaccttagttggaaatgcagaaatcacccgccttctgcgtcgatcttgccgggagctgcagactggagctattcctatttgaccatcttgccagcaatccccccaacctttttttttttttttttaaaaagggatgggggtctcactatgtcaccccggctggagtgcagtgacacattcttagttcactgtaacctcaagctccagggcttaagagatcctcctgcctcagcttcctgagtagctgggactataggtgtgcaccaccacacctggctaattttttttactttaattttattttatttcatttttttagaaatgaggtctcactgtgttgtgttgctcaagctggccgcaagcaatcctcccacctcaggctcccaaggcactgggattataggggtgagccacagcccctggcccagtgtaatcgttacttgtattttatatgacattctctagttggtattttatgctttccttgaaaagtctcattttgatagagactattttctgccattttgtctggttcatttttttctattactatgagtttaagtaaccttttatagccagtaagatagcccattaagcccattatactttcttggtggttgattttccctcttttgcatacataggaaatgctcggaacttctttacgtttttcaaacgcagctggctctgaaactgctccagtgtctgaaagtgacggatgcgcctcatttctatggcctgccgtcccttgagcggaccttacgagggatggctaacctcactgcgtttccgggatggagctcacactctcctctcacaaagcctctagatatctgtgtgaagtacttgtcaggtctccttgag

SEQ ID NO: 13859 - DNA, 892 bp, Homo sapiens
tatgctgagaatagcttggaacctgtcatggtatcatgggagtgataatctgttgaagcaaatgaactctgaaactaaaacgcaagaatatgaatcactaggaaaagggtcctggattagaacaaaatctcaaattttagatgcattgaagttatctacagaggacatcctcactctgaagataacacacatggctagtgggctgcaggactgcctccattccattgttcaggctgcaacccacagggaagttagggctgctgtcaccaggatgagtttttatcttctgaatgacagattgtctttaaagggttgccctggtccatgtggggttaccttgaagtccttggcttggcacaccgcactaaacaggtttttacaggtgcttcctgcttgcactgaagatgagaaactgctaatagatatcatacattttttaaataaattaataaaggaacaaagaaaaaattcttcactagaacttctaaactggattctcgaattacttcttagacatagtgcaaacccactgttagacctcttggttctgacagagtcacaggcacgagaagaaacagatgatatccggactgctgtcaggcaacaacttcagaaagaactgattgctctttttgataccttgctgctcaatttcatggaagttactgacaggaaatgctcggaacttctttacgtttttcaaacgcagctggctctgaaactgctccagtgtctgaaagtgacggatgcgcctcatttctatggcctgccgtcccttgagcggaccttacgagggatggctaacctcactgcgtttccgggatggagctcacactctcctctcacaaagcctctagatatctgtgtgaagtacttgtcaggtctccttgag

SEQ ID NO: 13860 - DNA, 5213 bp, Homo sapiens
ggtgggtaacccgacctttctctctggctgcccttaacattttttccttcatttcaaccttggtgaatctgatgattatgtgtcttggggttgctcttctcgaggagtatctttgtggtgttctctgtatttcctgaatttgaatgttggcctgtcttgctaggttggggaagttctcttgcatttaatatcctgaagagtattttccaacttggttccatttttccccatcactctcaggtacaccagtcaaacataggttgcttcttttcacacagtcccatatttcttggatgctttgttcattccttttcttttttttttttctctaatcttgtcttcacgctttatttcgttaagttgatcttcaatctctgacatcctttcttctgcttgatcgatttcgctattgatacttgtgtatgcttcacgaagttctcatgctatgtttttcagctcccatcaggtcatttatgttcttctttaaactggttattctagttagcatttcctgtaaccttttatcaaggttcttagcttccttgcattgggttagaacatgcttctttagcttggaggagtttgttattacccaccttctgaagcctgcttctgtcacttcgtcaaactcattctccatccaattttgttcccttgctggtgaggagttgtgatcctttggaagagaagagttattctggttttgggaattttcatcctttttgcactgggttttcctcattttcgtggatttatctacctttggtttttgatgttggtgaccattggatggggtttttgtgtggatgtccttttggttgatgttgatgctattcctttctgtttgttagttttcttcctaacgggcctctctgctgcaggtctttgggagttggctggaggtccactcctgcccctgtttgcctgggtatcaccagcagaggctacagaagagcaaagattgctgcctgctccttcctctggaagcttcatcccagagggcaccccccagatgccagctagagctctcctgtatgatgtgtctgtcaacacctgttgggaggtgtctcccagtcaggaggcacgagcgtcagggacccacttgaggaggcagtctgtccgttagcagagctcgagcactgtgctgggaggtccactgctctcttcagagacagcaggcaggaacatttaagtctgctgaagctgcacccacagccgccctttcccccaggtgctctgtcccagggagatgggagttttatctataagcccctgactgggcctgctgcctttctttcagagatggcctgcccagagaggaggaatctagagaggcagtttgggtacaacgtctttgctgagctgtggtgggctctgcccagtttgaacttcccagtgccttcgtttgcactgtgaagggaaacaggctacttaagcctcattaatggtggacacccctctccccaccaagctcgagcatcccaggtcgacttcagactgctgtgcaggcagtgagaattttaagccagtggatcttagtttgctgggctccatgggtatgggatctgttgagctaggccacttggcaccctggcttcagccccctttccaggggactgaacaactctgtctcactggcattccaggcactactgaggtatgaaaaatctcctgcagctggctcggtgactgcccaaatggctgcccagctttgtgcttgaaaccctgggccctggtggtgtaggcacccaagggaatctcctggtctgtgggttgcaaagaccatgggaaaagcgtagtatctgggccggaatgcaccgttcctcagggcacagtttctcagagcttcccttggctaagggagggagctcccccaccccttgtgattcctgggtgaggcgacaccccaccctgctttggctcgccctccatgggctgcacccgttgtctaaccagctccagtgagatgagctgggtacctcagttggaaatgcagaaatcacccgccttctgcattgatctcactggaagctgcagaccggagcttcctattgagccatcttgccagccaccctagtcatttttaaaaaacatcaagcagtgtgatatttgatgatcgtttttgtatagtagctcatgctactgatgtgtttgtatgatagtctttataatttatcatgaaagcagatctgtttttctgcctgccagaatgttagctgtaattgagtaactcattaatgtacctaattgtatacttatttttacacacttgtggtctttaaatgaatgtgccttttcttgaattctggccaaaaaatgaagcagcttcagtgtctttgacccttctatgcctgacatgaaaacaatgttttgaggttgtcctcccatataccacatggcataaaagattggttttgccatagtctagtgataccaactttatgtatgcattctaatgggaaaagaggggggtgtctgactagtccaagataagaatacaatgcagtgtctgggactgaacttttaaaaaatatatgttcatttttagaaaaagtcattactgtgcttgctgcctgtctggaaagtgagaatcaaaatgctcagaggattggagcagctgccctttgggctctgatttacaattatcagaaggtcagttttaaaaatcattgttacacctggggagcaaacaacaaggtataacccaggtataaactcttaggatacatccaaaggtgtcaagagttacagcaaaagaaaaaagacaaaatcaaagatccatgttccctttgctgattcatacaattagtaaaccatcagttgaaatctttttatttaatcatttcaacagaatgtctcagtttagaagagaatctctgaactgactttttcctcttaatttaaattgatttactttattattgcaattttagtatagattgtttcttctaaaagacgtatcaagggaaaacacatcttaaagtaaaactgagtaacaaaagttttatccaattgtacaattcccctttatctagctcagttcttgtacgactgcagcccaaagcctgctctgagaaaagggcaggcaacgtggagatttgtgttctactctttctctggcctttggacttccactttattgcagacatgttgttcccaagagaaatacccataagtatctagtgattaagtagtagccaagtgacagtgttaggatagacagccatcctagaatggtgttctctcagctgactgtctctgccggggctagttttctccctgctggccagagtcacgtacacaaggacaagagggtgttgttttctttctcacctgggtatccccagagcttagcacaggatttggcactttgtagtcactctgtaaatatttgttgaccaactgctaatatttggtatatgtgatcagaaatctgaggtttgagggagtatgaaaaactgaaaccaaggatgactagtttaaaatagcaaattgagattaggggagaaggagtaaaagagaagggaagaaagaaaatgggaatagagaaagaatcaagttagataagaggatatgggcaagacttcagaatgtgcaaggggattggctcaataggatgtattatgctaagatggaactctctagttatattattatatttcataatattctgtttaatactgtagttagcaatgggcagaattagtgttttgctatcatgatccataacacatggcaagaaacctaattaatggattgttctaggcaaaaacagctttgaaaagcccatcagtaaaaagaagagtggatgaagcatactccttagcaaagaaaagtaagttgcaataagaaagagattatagttaaactcagaagctattaagtggattttctgattaatgagatatttggacaggccacagcaaaatggcattgtaaaatgtgccaatattcagtatgtgctttaattatatcattttttaaaataataaaatagatagatgaaggtttaagatgtgattgcttctaaaaatgcatctgtgatcttcgtcttatttttgtactaaattttctttgccaacagtgaccactgtgctgaagtatgttcttagtgataagaactggcccaattagaattaactgtgagcagaaaacctggatctaacatcagggagctggaggacagtcttccaagaattgatcctgttacccttatatccacgtttccctgtgatgtggtcacaatactagagacggttttcttttcaaagcacattattcatttttagtgacaccaaatttcagtgagcgttattctctgaacattttttatgctaaaacactgaattgtgtctttcctgtactgtaatatatctgttggttatttgtgtttttatagtctgatttttttttttaagcaggggaggttttagtttgttttagctgcgaccatgaatttctggagctagtgaagttaaagattatgctttaggaaggatggtacataaaaaaagattaatggcattcatttggaattatagttaatggtatccattatggggggtactttttaaaaaatactctgggtaagctgttaatttaaaaaaatattgattttgtaacttgtttattttttaaaaaatgcaaaatattctggaatgctattacatcaagaacttagagctttaaattatatataaatcctgttcatatgtatttgtttatgtgtgtgcctcctaagtatagtaccaagtttcataaactagtatttctgtactcttatttttctatctcagctttcccaaactcagaagcaaaccctctaaatgcctattatttgaaatgtcttgaaaacctcgtgcagctccttaattcttcctgagtgccatgggatgctacaccttgaagctgacagtcatcaacaggggagctaaagttgaagccagctgtgtgtagcagctgttacctgaagacgtgctacctctctacaaagtgttgatccccttctttcccatgagagagagaactggtgatactccaacaccgtccagttgtggcagctctccagaagtaatagcagctgacaactttctgtgccttttcctttctgttgaaaaggcatagaaagttctgggaacataaacatttttacccttttctatgccatttattttgtaaaaatcctatttaacagttatttaataaaacaatat

SEQ ID NO: 13861 - DNA, 3943 bp, Homo sapiens
ggtgggtaacccgacctttctctctggctgcccttaacattttttccttcatttcaaccttggtgaatctgatgattatgtgtcttggggttgctcttctcgaggagtatctttgtggtgttctctgtatttcctgaatttgaatgttggcctgtcttgctaggttggggaagttctcttgcatttaatatcctgaagagtattttccaacttggttccatttttccccatcactctcaggtacaccagtcaaacataggttgcttcttttcacacagtcccatatttcttggatgctttgttcattccttttcttttttttttttctctaatcttgtcttcacgctttatttcgttaagttgatcttcaatctctgacatcctttcttctgcttgatcgatttcgctattgatacttgtgtatgcttcacgaagttctcatgctatgtttttcagctcccatcaggtcatttatgttcttctttaaactggttattctagttagcatttcctgtaaccttttatcaaggttcttagcttccttgcattgggttagaacatgcttctttagcttggaggagtttgttattacccaccttctgaagcctgcttctgtcacttcgtcaaactcattctccatccaattttgttcccttgctggtgaggagttgtgatcctttggaagagaagagttattctggttttgggaattttcatcctttttgcactgggttttcctcattttcgtggatttatctacctttggtttttgatgttggtgaccattggatggggtttttgtgtggatgtccttttggttgatgttgatgctattcctttctgtttgttagttttcttcctaacgggcctctctgctgcaggtctttgggagttggctggaggtccactcctgcccctgtttgcctgggtatcaccagcagaggctacagaagagcaaagattgctgcctgctccttcctctggaagcttcatcccagagggcaccccccagatgccagctagagctctcctgtatgatgtgtctgtcaacacctgttgggaggtgtctcccagtcaggaggcacgagcgtcagggacccacttgaggaggcagtctgtccgttagcagagctcgagcactgtgctgggaggtccactgctctcttcagagacagcaggcaggaacatttaagtctgctgaagctgcacccacagccgccctttcccccaggtgctctgtcccagggagatgggagttttatctataagcccctgactgggcctgctgcctttctttcagagatggcctgcccagagaggaggaatctagagaggcagtttgggtacaacgtctttgctgagctgtggtgggctctgcccagtttgaacttcccagtgccttcgtttgcactgtgaagggaaacaggctacttaagcctcattaatggtggacacccctctccccaccaagctcgagcatcccaggtcgacttcagactgctgtgcaggcagtgagaattttaagccagtggatcttagtttgctgggctccatgggtatgggatctgttgagctaggccacttggcaccctggcttcagccccctttccaggggactgaacaactctgtctcactggcattccaggcactactgagatgagctgggtacctcagttggaaatgcagaaatcacccgccttctgcattgatctcactggaagctgcagaccggagcttcctattgagccatcttgccagccaccctagtcatttttaaaaaacatcaagcagtgtgatatttgatgatcgtttttgtatagtagctcatgctactgatgtgtttgtatgatagtctttataatttatcatgaaagcagatctgtttttctgcctgccagaatgttagctgtaattgagtaactcattaatgtacctaattgtatacttatttttacacacttgtggtctttaaatgaatgtgccttttcttgaattctggccaaaaaatgaagcagcttcagtgtctttgacccttctatgcctgacatgaaaacaatgttttgaggttgtcctcccatataccacatggcataaaagattggttttgccatagtctagtgataccaactttatgtatgcattctaatgggaaaagaggggggtgtctgactagtccaagataagaatacaatgcagtgtctgggactgaacttttaaaaaatatatgttcatttttagaaaaagtcattactgtgcttgctgcctgtctggaaagtgagaatcaaaatgctcagaggattggagcagctgccctttgggctctgatttacaattatcagaaggtcagttttaaaaatcattgttacacctggggagcaaacaacaaggtataacccaggtataaactcttaggatacatccaaaggtgtcaagagttacagcaaaagaaaaaagacaaaatcaaagatccatgttccctttgctgattcatacaattagtaaaccatcagttgaaatctttttatttaatcatttcaacagaatgtctcagtttagaagagaatctctgaactgactttttcctcttaatttaaattgatttactttattattgcaattttagtatagattgtttcttctaaaagacgtatcaagggaaaacacatcttaaagtaaaactgagtaacaaaagttttatccaattgtacaattcccctttatctagctcagttcttgtacgactgcagcccaaagcctgctctgagaaaagggcaggcaacgtggagatttgtgttctactctttctctggcctttggacttccactttattgcagacatgttgttcccaagagaaatacccataagtatctagtgattaagtagtagccaagtgacagtgttaggatagacagccatcctagaatggtgttctctcagctgactgtctctgccggggctagttttctccctgctggccagagtcacgtacacaaggacaagagggtgttgttttctttctcacctgggtatccccagagcttagcacaggatttggcactttgtagtcactctgtaaatatttgttgaccaactgctaatatttggtatatgtgatcagaaatctgaggtttgagggagtatgaaaaactgaaaccaaggatgactagtttaaaatagcaaattgagattaggggagaaggagtaaaagagaagggaagaaagaaaatgggaatagagaaagaatcaagttagataagaggatatgggcaagacttcagaatgtgcaaggggattggctcaataggatgtattatgctaagatggaactctctagttatattattatatttcataatattctgtttaatactgtagttagcaatgggcagaattagtgttttgctatcatgatccataacacatggcaagaaacctaattaatggattgttctaggcaaaaacagctttgaaaagcccatcagtaaaaagaagagtggatgaagcatactccttagcaaagaaaactttcccaaactcagaagcaaaccctctaaatgcctattatttgaaatgtcttgaaaacctcgtgcagctccttaattcttcctgagtgccatgggatgctacaccttgaagctgacagtcatcaacaggggagctaaagttgaagccagctgtgtgtagcagctgttacctgaagacgtgctacctctctacaaagtgttgatccccttctttcccatgagagagagaactggtgatactccaacaccgtccagttgtggcagctctccagaagtaatagcagctgacaactttctgtgccttttcctttctgttgaaaaggcatagaaagttctgggaacataaacatttttacccttttctatgccatttattttgtaaaaatcctatttaacagttatttaataaaacaatat

SEQ ID NO: 13862 - DNA, 4547 bp, Homo sapiens
aggaaaactaatcctaaaatttccataagataggtgatagaagtatatacgaaacttactttcagtggaaagtaattcctagtatttatttacattttagtttcagataattttgatgaaaacgcataaaatttagagtaagataatattatggtctgtttgatctcacctgataattggtgaaaatgaaaagctgtgtttttcctcctggcccaggttgtagaatgtttggtacaaccatgcctcacactcttgaggaaggttttatgtggtgatccagtcatgcgtgtttcgctctcgcaacagtcttctcttttgaccgtgttattcagagtttccttaatatttcatgaagattgtagtgtcgtgactgaagttggagcactattttgtcttctattatttgatgaagtatcgagaatggatatgtggtctgttaatccttccaataaaccttctttgccatcggtcttcagtttgcctgtttccgtttttagaaggtaccatctacctgttcatgtaattggacaccatgctgtgagtccttactccatagttttgcccttatctgctgattgtttggccttgaagccggtgtcagatatgctgagaatagcttggaacctgtcatggtatcatgggagtgataatctgttgaagcaaatgaactctgaaactaaaacgcaagaaattttagatgcattgaagttatctacagaggacatcctcactctgaagataacacacatggctagtgggctgcaggactgcctccattccattgttcaggctgcaacccacagggaagttagggctgctgtcaccaggatgagtttttatcttctgaatgacagattgtctttaaagggttgccctggtccatgtggggttaccttgaagtccttggcttggcacaccgcactaaacaggtttttacaggtgcttcctgcttgcactgaagatgagaaactgctaatagatatcatacattttttaaataaattaataaaggaacaaagaaaaaattcttcactagaacttctaaactggattctcgaattacttcttagacatagtgcaaacccactgttagacctcttggttctgacagagtcacaggcacgagaagaaacagatgatatccggactgctgtcaggcaacaacttcagaaagaactgattgctctttttgataccttgctgctcaatttcatggaagttactgacaggaaatgctcggaacttctttacgtttttcaaacgcagctggctctgaaactgctccagtgtctgaaagtgacggatgcgcctcatttctatggcctgccgtcccttgagcggaccttacgagggatggctaacctcactgcgtttccgggatggagctcacactctcctctcacaaagcctctagatatctgtgtgaagtacttgtcaggtctccttgaggtcattacttctttttatgtggagcgtggaggaaatgctatgtccttcatgggaaaaggtgttacaaagagcacaattctttgcttgcttcacttatcccatgagatgatggcccaggctgggagcttggagtggatgtcactttggttcttgcctttgggtagtcatagtgaagaacatattcctactcaacaaggattggcttggttgattccattatgggttgatcgggacccagaggtgagattcacttcactgggattaggatcagcactgaccacccttgaaacgggctgtgtggccttagcaaacagttgtcagaacatttccggtgggctctggggaactgtggtgaacattcttctggaccagtcagaatgtagtatggtgcgccgggaggcggcatttattcttcagaatctccttgtaattccaatgcctacagaaattataaaggattatacttggcagggtccctgtgttcatgatgaggactctggcctatcgctcattggaaaacctgcccttcaggctcttttatatcactgccatttttatgaacatttgaatcagatggtaaagcattgttacctaggacggtgtatgtttgatttgaatttttctgcttttgatagaaattcagaaagcaatgatttaaatggtttagatgactcattcaagttttggagggctccatctaggacaagtcaggatcgagatccaagttctctctccacctcagaaacaacggtggcaccttcattggggagtactgaatttcagccacttgtgcagtcaacaacacttctacctgaagcctcccatgaccagtttgtggctcaaggtcaccaggaaagtacatcaccacggccacctcatgattcatctctttctgctcccctgcccaaactgtgtgtttttgttactccatctcttctttcagcaatgtgcagcctcttggacaacctcttgacgattgctcccagagacactgcaaaggcttttcgacaagctcatctcatagaacttctctgtagcattgcagatgctaccctcatacagacatgtgtccaggaactcagagccctgctgccttcatcacctccagctgaacacactcaggctcaggtttcctttctcctggaatacctatcctctttgtccaggcttctgcagtcatgtttattggtggagcctgaccttgtgattcaggatgagcttgtgaaacctcttatcaccaatatcattggaattctcaccatatgtaccaaagatgtattagataaagagttaatatcagctttttatcacacatggacacatttatttaatcttctggccatgctcctgaggaaagctggtgccatcacactcccgtttgttaccgtggccctggccaagcactggacagcggcgattgatatgttctgcacatgtgcaggcttgtctgccacgtgtcctgccctgtatactgccagcttgcaattcctttctgttctcttgaccgaagaagcaaaagggcatctccaggctaagagcaaaacacatttatgctgtagtccaacagtggcttcacttcttgatgactctcaggaaaatcagaaatctctagaacaacttagtgatgtaatccttcagtgctatgaagggaaatcctccaaagatatcctgaaaagagtagctgcaaatgcattgatgtcactgctggctgtcagtagaagagcacagaaacatgctttgaaagccaatcttatagacaattgcatggagcagatgaaacacataaatgcacaactgaacctagattctctgaggcctgggaaagcagcattgaaaaaaaaggaggatggtgttattaaagagttaagcattgccatgcagctcctaagaaactgtctttatcaaaatgaggaatgtaaagaagcagctcttgaagctcaccttgtccctgtcttgcactctctctggccttggattttgatggatgattcattgatgcaaatttctctgcagctcctttgtgtctatactgcaaattttccaaatgacattgtgataggctgttatttttgaaggttgcagttctctttgttggtcaagttgtggacaacaccctgttcaagctacacatagaggagccgtgagcaactctctgatgctgtgtatcctaaagttggcttcccagatgccactggagaacaccacggttcagcagatggtttttatgcttctttcaaacctggccttgtcgcatgactgtaaaggagtaattcagaagagtaacttcttacagaacttcctctctctagcattgccaaaaggaggaaataaacatctaagtaatctgactattctttggttgaagttactcctgaatatatcatctggagaagatgggcaacaaatgattctgaggcttgatggctgtctagacttactaacagagatgagcaaatacaagcacaagagcagccctttattgcctcttcttatctttcataatgtttgcttcagtcctgcaaataaacccaagatcctggctaatgaaaaagtcattactgtgcttgctgcctgtctggaaagtgagaatcaaaatgctcagaggattggagcagctgccctttgggctctgatttacaattatcagaaggcaaaaacagctttgaaaagcccatcagtaaaaagaagagtggatgaagcatactccttagcaaagaaaactttcccaaactcagaagcaaaccctctaaatgcctattatttgaaatgtcttgaaaacctcgtgcagctccttaattcttcctgagtgccatgggatgctacaccttgaagctgacagtcatcaacaggggagctaaagttgaagccagctgtgtgtagcagctgttacctgaagacgtgctacctctctacaaagtgttgatccccttctttcccatgagagagagaactggtgatactccaacaccgtccagttgtggcagctctccagaagtaatagcagctgacaactttctgtgccttttcctttctgttgaaaaggcatagaaagttctgggaacataaacatttttacccttttctatgccatttatttt

SEQ ID NO: 13863 - DNA, 3175 bp, Homo sapiens
caatgtgcagcctcttggacaacctcttgacgattgctcccagagacactgcaaaggcttttcgacaagctcatctcatagaacttctctgtagcattgcagatgctaccctcatacagacatgtgtccaggaactcagagccctgctgccttcatcacctccagctgaacacactcaggctcaggtttcctttctcctggaatacctatcctctttgtccaggcttctgcagtcatgtttattggtggagcctgaccttgtgattcaggatgagcttgtgaaacctcttatcaccaatatcattggaattctcaccatatgtaccaaagatgtattaggtctggaaaatgaagtgtgttatgatacccagcaaagccagttctcagcatctcatcagtgttaaaatgatctcgatgttaaaggaatagtaattccttagaaattcaacaagtggcagtgataccctaactaagcttattaggttagactggacaagctcaacaaggtgatatcacccccagtctctaaggagtgaacattgattctggggagaagaggataaagagttaatatcagctttttatcacacatggacacatttatttaatcttctggccatgctcctgaggaaagctggtgccatcacactcccgtttgttaccgtggccctggccaagcactggacagcggcgattgatatgttctgcacatgtgcaggcttgtctgccacgtgtcctgccctgtatactgccagcttgcaattcctttctgttctcttgaccgaagaagcaaaagggcatctccaggctaagagcaaaacacatttatgctgtagtccaacagtggcttcacttcttgatgactctcaggaaaatcagaaatctctagaacaacttagtgatgtaatccttcagtgctatgaagggaaatcctccaaagatatcctgaaaagagtagctgcaaatgcattgatgtcactgctggctgtcagtagaagagcacagaaacatgctttgaaagccaatcttatagacaattgcatggagcagatgaaacacataaatgcacaactgaacctagattctctgaggcctgggaaagcagcattgaaaaaaaaggaggatggtgttattaaagagttaagcattgccatgcagctcctaagaaactgtctttatcaaaatgaggaatgtaaagaagcagctcttgaagctcaccttgtccctgtcttgcactctctctggccttggattttgatggatgattcattgatgcaaatttctctgcagctcctttgtgtctatactgcaaattttccaaatggttgcagttctctttgttggtcaagttgtggacaacaccctgttcaagctacacatagaggagccgtgagcaactctctgatgctgtgtatcctaaagttggcttcccagatgccactggagaacaccacggttcagcagatggtttttatgcttctttcaaacctggccttgtcgcatgactgtaaaggagtaattcagaagagtaacttcttacagaacttcctctctctagcattgccaaaaggaggaaataaacatctaagtaatctgactattctttggttgaagttactcctgaatatatcatctggagaagatgggcaacaaatgattctgaggcttgatggctgtctagacttactaacagagatgagcaaatacaagcacaagagcagccctttattgcctcttcttatctttcataatgtttgcttcagtcctgcaaataaacccaagatcctggctaatgaaaaagtcattactgtgcttgctgcctgtctggaaagtgagaatcaaaatgctcagaggattggagcagctgccctttgggctctgatttacaattatcagaaggcaaaaacagctttgaaaagcccatcagtaaaaagaagagtggatgaagcatactccttagcaaagaaaactttcccaaactcagaagcaaaccctctaaatgcctattatttgaaatgtcttgaaaacctcgtgcagctccttaattcttcctgagtgccatgggatgctacaccttgaagctgacagtcatcaacaggggagctaaagttgaagccagctgtgtgtagcagctgttacctgaagacgtgctacctctctacaaagtgttgatccccttctttcccatgagagagagaactggtgatactccaacaccgtccagttgtggcagctctccagaagtaatagcagctgacaactttctgtgccttttcctttctgttgaaaaggcatagaaagttctgggaacataaacatttttacccttttctatgccatttattttgtaaaaatcctatttaacagttatttaataaaacaatatttttagaaactaaaaattgactaataattgctgcttacagacttttatcagtctcatgaatattaattttaggagttgaaataagacactgtgtcctggttgtttctctctttttttaaattttaactgatgtaaaatttggctctgtcagtgcaaatccttattttcaaaactttctgttatccagagcatccacactggaaaagggctatgtagaagtaagtgtgcattatttgtaaagggctgtgtggaagtaaatgtacatgatttgtaagtagctttcttaggcaagttttagtgatgttatcttcttcctagatgactcttaaatcattacatgtataatcttcaccgttgtcttctgcaaggctgtgtaataaagaagaaagaaatagagttggggctgtataagcctgggttcaaatttagctcagcccaaaacatcatgaagaatagagtaagactgaaaaatgcagaagatggccgggcttggtggctcatgcttatactttcagctctttgggagaccgaggtaggtggatcacttgaggccaggagtttgagaccagcttgggcaacttggtgaaatcccatctctcctaaaaatacaaaaattagccattcctggtcttgagcgtctataatctcagctactccagtggctgaggcacgagaatctcttcaacctgggaggcagggaggttgcagtgagctgagatcatgccactgcattccagcgtgggtgacaaagcaagactctgtctcaaaaaaaaaaaaaaaaaaaaaaaa

SEQ ID NO: 13864 - DNA, 3307 bp, Homo sapiens
acatttccttggctacccctgaccaccacagacagacatgtcctctcctctaatgaaagctctttaagaagtagtaaccacactttaatctggaacacctgtgaactattgaaggatgttatcatgcaagattttcctgctgagattttccttcaaaggccaaaaattgttcagagccttttatctctgttgaaactggcctttggagatggaaagcatcgcctggcattacagtcggtgtcctgcctgcagcagctgtgcatgtatttaagaaacagacttaactttcaccgagatccaggttttttctccaataaacacgacacagtttcccaaaattcttctttgtcttattgtcatgaagcaagaggtactcatcattcccagaatccttccccaggaagcagcagccctcggccttctgtggttgggcgcacaggccagcgacccagaggagatggccaggactgggatgcagcgtcctctagtggaagtagtagtcatgctcatgtaaactccaggatatccgttcattcacctttggatatgggacacatagatctgccagagctggaaactgaagacacattggaactacaattccagcagctcagtcttccccagttttgtgtctccattctggaatcagctgttcctctcttaagaacaggtagcagacaagtgataataagagttctggaattgcttacagaggatatgacacttattggtgaagcaatttcaacagatatctgggatgacagcagcctttttggtatagatatgaaggagaaactactcctggtgttgggagcccttggagaaaccatgtgctaccataaaagtagtatcagtttggagcagccagaggtgatgcttgtgcaccacagaatggcctttatcagcatttccctgtttgcagttcgactgctacaaacgcttctccctgttgaaaaggcaagcgagtttttatcagagcctatgtcaacagcattatttctcctttctttggacatgcctatttctttggaatatccaaatattcatgaagctgttgtggcctatttggaacagctgaattctgaaaactacagtatttataaacgaactgcagaggccgtttattcaattgaatgcacctgtaacttcctgtctgatattgggaaagagggagagaagaatctcttagaattagtggagctggcagaccaagccttgcgtagcttttcctatcatcagcatttcccgctaataaaggaaatcatcagcatttgttcaaagatctggaaatctgctcaggccagtccattactacaaggagaaagtcagaaggtgcttctccatatgttgtctcacccattgccacgagtgaaagctgaaacttaccactgctgtctggaaatcacgaaggaatgtttaggtgtccataatgtcactaaacccgtgtcttcactttgcaatggaattcattttctacttcatccaaaagttctgtatgaaatctctgtatttggcattcaagagcccgaaagtgaggtgaacactgctgccaaggccattctgttatacctgcttcagggacgattgatgatgacagcattgacctggaacaagtttattgaatctctctgtcctgtcatcccaatactacagggctatgccgacacagaagatcctctgggtaactgcattctccttctaagcaaagcaagttctgacacagaagagatgcttccgtgtactacccgattaaagtccatgctgcgacttttgctagtgaaaaagccatcggtccgttcgctagcattaaagcttttagcattccatcttaccagtgaagaaggggctgatacaaagcgtcctctaatagacgccagagttctctccagagttactgatttattcattgggaagaaacctattgaactcagactggatgacagaagagagctggttattaagttggagactgttgaaaaggtatatgaaatcttcacctcagatgatgttgatctcgttttgagaaagtcagctgctgaacagttagctgtgattatgcaagatattaaaatgcatgctgtggtgaaaaagttatgcttaattgacaaaataattgagtatttaaatgaatgtgtgagtcaagatggcaaggttgtagaatgtttggtacaaccatgcctcacactcttgaggaaggttttatgtggtgatccagtcatgcgtgtttcgctctcgcaacagtcttctcttttgaccgtgttattcagagtttccttaatatttcatgaagattgtagtgtcgtgactgaagttggagcactattttgtcttctattatttgatgaagtatcgagaatggatatgtggtctgttaatccttccaataaaccttctttgccatcggtcttcagtttgcctgtttccgtttttagaaggtaccatctacctgttcatgtaattggacaccatgctgtgagtccttactccatagttttgcccttatctgctgattgtttggccttgaagccggtgtcagatatgctgagaatagcttggaacctgtcatggtatcatgggagtgataatctgttgaagcaaatgaactctgaaactaaaacgcaagagtttttacaggtgcttcctgcttgcactgaagatgagaaactgctaatagatatcatacattttttaaataaattaataaaggaacaaagaaaaaattcttcactagaacttctaaactggattctcgaattacttcttagacatagtgcaaacccactgttagacctcttggttctgacagagtcacaggcacgagaagaaacagatgatatccggactgctgtcaggcaacaacttcagaaagaactgattgctctttttgataccttgctgctcaatttcatggaagttactgacaggaaatgctcggaacttctttacgtttttcaaacgcagctggctctgaaactgctccagtgtctgaaagtgacggatgcgcctcatttctatggcctgccgtcccttgagcggaccttacgagggatggctaacctcactgcgtttccgggatggagctcacactctcctctcacaaagcctctagatatctgtgtgaagtacttgtcaggtctccttgaggtcattacttctttttatgtggagcgtggaggaaatgctatgtccttcatgggaaaaggtgttacaaagagcacaattctttgcttgcttcacttatcccatgagatgatggcccaggctgggagcttggagtggatgtcactttggttcttgcctttgggta

SEQ ID NO: 13865 - DNA, 11756 bp, Homo sapiens
tggaacaagtttattgaatctctctgtcctgtcatcccaatactacaggtattctgtgaaattcactttttatgataccatttatctttggctgggtgtgattgatttaaatgcatgcaaacagctaaactgtcaagttgtgagagaaatgaagagaagctgtgaaggcgctggggataagtgaacaggaagtgggtggctgtcttgtttctggcagaaagttaaaccaggatagctaatttgtctgtatatattttatatatctgggtgggaggttaaaaagtgaggtgcattcacagcattgactgtgaaaaatagaactcaaccttatataaaggcttttaggcagagctaacagtgctttttaaggagaccttacataactaacttgcctcatgagttctatccatgcatatgtatgattagagtgataccgtaattaacatgctcctagaaacagcttttttttttttttttaaaaaagcaatccttctggacattaaaggagtcagtttcctgtctcttttggatgaaaaggtggagttcagaaatgccatcataagcacagtcctcttttagaagagagagcctgggccttgtgccttgagactcacagattccatgcgtgtagcatttagagcactccatcttcttagggtggggatgggctgaggatctgtgaggtgcttcaccgaggggaggtgccactattagaatcttagaaaatagaaaaatcagcaagtgtcaagaaggttggcatgttttcctgaagttctcctgtatgtatgtgtattttcttttaaatacagttttatttaggctccttggctcatagaagttattttaaaaaataatgattttattcaactgaatccaaagacatttatgagttgctgataggacaatacaattcttattttcaagttgaaaagttatgtatacaattagacaataatttctctttaaaaacaaatctattagggctatgccgacacagaagatcctctgggtaactgcattctccttctaagcaaagcaagttctgacacagaagagatgcttccgtgtactacccgattaaagtccatgctgcgacttttgctagtgaaaaagccatcgtgagtacaacgtaatcttgtgaacgtcaaagattgatggaaacatgctaagaaagtatagtaactatatataatttgaaacaaaactaaagaatttttaaggagggtgttattccattactagaggaaaccaatgcgtgaaactaagcagatacaaggtcttgtatgtacttgctgacgtttcatccactttacagccaagttattccttgccagatcagcctgtgttacaggactgctactaagtgccgctcagtagtgccctaggcaagttggagagccatggagataaatagatggtaaaaattatagtgcattcccatcttctctttagaaattgttagccttccagagtgatccttttgtaaacatctgttctgaatattcagtttttcataagtatagtaggccagttgtctcaaataccagagttatgcaggtattttaatcccatatagctgtgttcttacttggggaactgaaaacatatcctttctttgactgccattaatataagcattgttttaattaatgaaaagaaggagaatgatactgtttttcttccttctctgtcattgcaacatgaatcttttctattattatttttaggtaacagtggttagattttcccttactgaaaaaagaaaaaaatgctgagtcgagatggataagcagggataaagaggaatagttggttgaaaaggctaggaagaatggacagacattcttttcacaatggataatttgtgtttcccaaaccttacatcaggaaaatacagcagcttatttatagacagatcattggactgaaagataaggaaataggtggaagttaactaaactattaagagaatggaaggaggaaaattatagtctttaaaatatctctgtattgtagagagtaatgttatgggtgatccaggaagaagtagggcagagggagttaacgtgcttgtgttctcaggggttgtcttctacacatgcagaaaagctgttccctgttaattaacatgctagtgtggtactccttacttgaacaaacccccagtttggagaattaacacaatagggggcatttcttgtttgtttttcgggcccaaggtcctcagtttaataaagacattctaaggcaggacacccccaggagcatagtgcaaggaaaggccagatctttctttgggtaagataagtctctattatatagaatttgaaacaattcaaatgacatatttgttttccttattgtattaattctaccccatcccatcaacccatccataaactccatgtagacaggaaccctgtccgttggctaatctttatattctcagaacttcatagcgtaccttatacataaatacacagtcatgcgttgcttaatgacatggatgcatcctgagaaatgctttgttaggtgattttgtccttgtgtgaacatcatagaatgtaccttacacaaacctaagcaataataacttaactacatacataacctaggctatatcctatagcctattgcttctaggctacaaacctgtacagcatgttactgtactgaataccatatgcagttgtaacacagtggcatttgtgtatctaaacatagaaaaggtttagaaaaatatagtaatataatcctatgacaccactgttgcatatgtgatctactgttgactgtaacattgttatgcagtacatgactgtactcaaaagttttaaagaatgacatacatgtataggaataactggattctggcatcctatgctaaacctaaaaagatgctaaatgtatataccagagaacaagatgcataaatacatgctttacatatctcatctctagccacctttgctaggggttatacctgtctctcaactgacaaccccagatgtgaatacagatatcattggcttagaatgtaaggaacaaaggaaaactattaggtaggtgtttagcctttctaagctctcttgaggtaactcaggaaatggagagggagaaagtttgcctgacttattagtcctctggagatgatatcagttaacaatattgcagtaaatatctactttgtgtttgattcaggaagtatttattgggtgtcttactatgtatctatgagctgtgggaacgtagcagcacacaacacagacatgggccctgccctttcagcatttagtgtgtaaccgggaatatagctcttattatcaattattctttattattaattgtcataaagtgagataaaagttatgatacaggggctcaaggtggcaggcctgcatacagaaggcaacctgctctagtctgtagtaggagggccaccctaatgatgcatgttttaattgttgtcttataggtagttcttaaaacctggcaacttgtattattgcttaaaatttgtccagtttccaggtagttcaagaacctatcagaggagtgacagatacatggttgtctcaatatctgccgcctcagtgacctttgtccactcagtggtttttctgtttctctatttcattgtttagtggcatacagtatttactcttttcttgaaaggtctcccacctccccactcagctgaccttattcctaatcccttccagataaggaaaaagtatttgtattttcatatttgacaggaatctgtttggcccctaatatgagaagattttgatacattgtagtgttatcacacttccattatgagcgtcattactctcctgtgggttcaacttaacatttggactgtggtcagcggtctgtgatactttttatggtggagaatagttcactagatttgaagacaggagttattgatttaattcgcagatgtacttattgaagtttactgatatttaatctcagtgagtctgtctcatttgtagttattattttttgtttctgatgtttattttataactattacattgaataaatcattataattatatatcgaagaatttttagtagaaaaagtaaattattactagtaatggcagtataattgtgactacttattgtactttgttgatatataattacttgtaattacaagcccttttaaaatagacatttgcatatcacgaaagttcgacttaagtactttgtgttctcagggtccgttcgctagcattaaagcttttagcattccatcttaccagtgaagaaggggctgatacaaagcgtcctctaatagacgccagagttctctccagagttactgatttattcattgggaagaaacctattgaactcagactggatgacagaagagagctggttattaaggtgactataaattttgagtttattactgtgtggtaatttgatacatttttatatcatgtattttatgtgacattcttcagtttgtgtatgtcctggggagggagagaagtatggggattcagggctggtttgaaattgtgttctggctttatctggcttctagatacgttgatttattgcagtggtcccaacctttttggcactagggaccagtttcacaggacaatttttccatggatcagggcaggagtattgttttgggatgattcaagtgcattatatttattgtatactttatttctattgttattacattgtaatatataatgaaataattgtacaactcaccataatgtagaatcagtgggagctctgaacttgtttttctgcaactagacagtcccatgtgggggtaatgggagacagtgacagatcatcagacattagttaaattctcttaaggagcagccagccaagatccctcacacacctagctcacaatacggtttgcactcctatgagaactgaatgccgccactgatctgacaggaggtggagctcagatggtaatggcagcaatgggcagcggctgtaaatacattttcctgtctttagctaggactgtacctatagcatactggactgatggagaattctataaagaaagctgtccactagtccactgttttcatggattcattcctgtgttttgtactttctcatttcactcaagtttgcaatctgtctgttttattttagactaacttgccaaggcctgtagtagtatggtagagccacatgtaatacagtcggtttttttgtttgtttgtttgctttttaatggggaaacacattatgttcttctaaactgaatgttcagggctttatgacagtgctggcagggggattggagagtcttcactggccacataccaggtctggttgggacttccctgagtactaagccattggtagtcactcctgtgccctgatgtatggaggaaggcggggagagggcattctaatacgtcttctgtgagtccatgttaggactggaagatagcagtgagtgggagaaaggagcttcatctttgttattttcttgtccctttttcctgatgctggttttgccacctcagattctgttctagcatgaagtgacagtaagggacttgtctggggggtagctttgaaggggtgctggacagcaagtcccagagtgctgtttgctctggggtcttctaaaagaaagaatggagaggcccacgggaataccagctggtggcttctgggagcaacagggaaatcttgagtcataggtctgggtcgcttttctcaggttagcctggtactacctgtaaagatgttagggaacatggttgttttctgttacctttgtaaggttgctaatggattaatgggttatgaataacttcctagcaaaaatgtatattaagaagagaggggccgggcacagtggctcttgcctgtaatcccagcactatgggaggctgagatgggtggaccacttgagcccagcctaggcaatatggtgaaaccctgtctctactaaaaatacaaaaaattagctggggttggtggtgcatgcctgtagtcccagcaacttgggaggctgaggtaggagaatcacctgagcccaggaagtcgagtctgcagtgagctgagattgcaccactttactccagcctgggtgaccagagtgagaccctgtctcaaaaaacaaaaaaaaaaaaggaaaacttatttgacatgatgactctttattttagatcttaagttccttcctgacctactgcatcattgttgcaaattttatttatttatgtatttattttaaacttttatttcagtttcaggggtacctgtgcgggtttgttatataggtaaactcgtgtcatgggggtttgttgtacagattatttcgtcaccctggtactaagcctagtacccgatagttatttttcagatcctctcccgcctcctaccccccaccctcaggcaggccccagtgtccgttgttcccctctttgtgtccttgtgttttcatcatttagctcctgcttataagtgagaacatgcagtatttggttttctgttcctgtgttattttgctaaggataatggcctccggcttcatccatgttccctcaaaagacatgatctcgtccttttttagggctgcatggtactctatggtgtatatgtaccacattttctttatccaatctgccattgataggcatgtaggttgattccatgtgtttgctgttgtgaatagtgctgcagtgaacatacacatgcatgtgtctttatggtagaatgatttgtatttgagtatccaacatctataaggaacttaaacagatttacaaaaaaaaaccaaacagctccattaaaaagtggacaaaggacagaacagacatttttcaaaagaagacatacatgtggccaaaaggcatatggaaaagagctcaatatcactgatcattggagaaatgcaaatcaaaactgctacgagggaccatctcacaccagtcagaatggctatttatttattttttttgtgagacagagtttcactcttgttgcccaggttggagtgcagtggtgcgatcttggatcactgccgcctccgcctcctgggttcaagcgattctcctgtctcagcctcccgagtagctgggattacaggtgtgtactaccacacccagctaatttttgtatttttagtagagatggagtttcacaatgttggccttttgtgtttctagtagagatggggtttcaccatgttggccaggcttgtcttgaactcctgacctcagatgatctgcccacctcagcttcccagagtgctgggattataggcgtgagccatcgcacccggccagaatggctattattaaaagtcaaaaaatagcagatactggtgaggttgtggagaaaagggaatacttacacactgttgatgactgtgtaaattagttcaaccattgtgaaaagcagtgtggcaattccttgaagacctaaatacagaactgctacttaacccagcattgtgtgaatttacctgtaattatgttggttatttaaataagttgactttttgagcttttgttcatagggcacaaactataaaatcttattggagaattggaagcagataaatgtaattttggtttttttttttttttggtttgtagttggagactgttgaaaaggtatatgaaatcttcacctcagatgatgttgatctcgttttgagaaagtcagctgctgaacagttagctgtgattatgcaaggtaatgtcttttaagggaaatgattgctgtactgctgataatagaattttagattgccatatggtactggcaggagttggcaactatggtttatgcgccagatccagcctgtggccttttttttgacagccctcaagaatggtttttgcatctttagagttgttaacaaaatccaaccaaaaccaaagaatatgcgagagaccatatgtgtgtgtctagcaaagcctaacaacatgcttactaacctggttctttacagaagaagtttgctaatgccttattattatttgacctgtaaaatgccatttgatagaattatcttctttctaaaatattagtgtacttccaatagtgaagtgcatgttccttcctctgtttactgagtgcatgcatcatattttcaatctgtaccatcttgcttagggaaattaatcaaataatacttttgtggtaggtaaaagaaaaatagtacactgtagctatgccttttctttaaacgtttatttttatttttttaaattatactttaagttctagggtacatgtgcacaatgtgcaggtttgatacataggtatacatgtgccatgttggtttgctgcacccatcaactcatttatattaggtatttctcctaatgctatccctcccccaacccccaactctgtgacaggcccgggagtgtgatgttccccgccctgtgtccaagtgatctcattgttcagttcccacctgtgagtgagaacatgcggtgtttggttttctgtctttgtgatagtttgctgagaatgatggtttccagcttcatccatgtccctgcaaaggatgtgaactcatccttttttatggctgcatagtattccatggtgtataaatgtttatttttaaaaacaactagtgtaatacactgttagctttgtttgtagtgttgttattccataggcttttgttctttgggttagttttgaatttttccccatacgtgatgtatgtactttaatatttatgagaaatgataactttgagtttatgtaaaaagatttttatggttagcacttcttgtcttgacattagtggaaactggaatgagagagttatttgaaaaaacatattccacatatttttagttttaacaacaatcacacagactacagaaaagaagactagaaaatgtggaaagccctggttaaaaaaaagatcaagaaaaactcgttaaagagtattccttcaatattgttaacatttcaaaagtatgccttataattttggtatgcactatattggggggcaatggaaatttttttttttaagtagcagctaaagattgttacaatgatagcttccacttcaatatcagtatgtgagtgtatgtgtttttcctaatgagaatataggagaaaatttgtctgcaagttgttaaatacttgtaacgaatatataatcaattacagttttgggttccggtaacatttgtgtgtgcgtgtgcacatgtctatacatataagatttttttatgtatatacaaaaacttctttattacaaacataatatgtgaatatatgcttattaaaaagaagctcaagttctccagaaatatatagtgtattataatcttgttccttttatatttgctattaatagtttgaggttagagatttttttatagatagaaaaatgttcatgttgtaagtcatattttacacatgagcttgtggagaattataaacatttgaaggtgataaatttggaagagtcaatgaaataatataaagaagataatttgcatgtataaatataagcattcatttgtacacttaaattctcgtagttttcagagtctgaactagttccataattctttttttatagttttgtattttatgtgacagaagtaagatatgctttttacttaaacattttcaaattggacaggtgtacgtaaagtaaaaagttaaaagtttcatactcttatgtcaaccccaggtctaagtatttttaatagtttgaaggttgtgtggatatcagttctgagtatttcaaaatacgtgttttaaactacaaaaaatgtgctttaacttttagtaactttttttatctacagatattaaaatgcatgctgtggtgaaaaagttatgcttaattgacaaaataattgagtatttaaatgaatgtgtgagtcaagatggcaaggtaaggctaatgtgcatctagacattgttttacaggctgttttgattaatcagatctgaaattgaactgagcagaatttggatgagtacttggattttaaattctaagtaacacctcctatctcattcattttttttttttaaattcgaaaagtggagtctctataaaggaaaactaatcctaaaatttccataagataggtgatagaagtatatacgaaacttactttcagtggaaagtaattcctagtatttatttacattttagtttcagataattttgatgaaaacgcataaaatttagagtaagataatattatggtctgtttgatctcacctgataattggtgaaaatgaaaagctgtgtttttcctcctggcccaggttgtagaatgtttggtacaaccatgcctcacactcttgaggaaggttttatgtggtgatccagtcatgcgtgtttcgctctcgcaacagtcttctcttttgaccgtgttattcagaggtaaataaaagaaaatctgctaataattagattgttcttaaattttaagtgtttcttctttaattgtaagtcacatttactttttattttactattagaacaacagcatttattagtgaatacactactaatgtaaatggaaaatgtttaatatttttgtggaaattgctttctaatcctgttgctgagtggaggctagagctgagaaaagctgaaacctctgattgttctttgtgccttgatgtagatgtcatctggtgctcagacagtaaactattatctataaagagagaaagttgcagctgctgttattactatcttctttccaatatctctttcgtctttcttgttttgcttatacctttggatcttggtacattttgtctgattatttcatttgacaggtgttaagagtataggctcaacctgtgtgagtagaaactagaccatcctaaatgactctgagcctaaatttattacattctataaaatgtggtttttaaaaacccattttaatttgattctaatttagtaaggtgttagatgaacacgtttcatgtagttttgtccttcctgtcttctctgtttttttttttttctcaatggagagcttggtaacattttgtactattttttttcttagagacttaggccactgctttttgatattttgcaagagtcatgtagaatcatctgaatgtgctgaagagtcacgtacaagcatctgaatgtgcttcatcttgtctattatcaggcatataggagataagtgagatttatgttcaaaatatgttattataatgtagtcattttattttagcatcttttcctcctgttggcttctgcttgccaagtgagtaagatgcagtttatttaagtagcagccctaaaaccaggtaaagctctaaacagattcagtgtgtttaggctcataacattttgagtggactataacgtttttataagattgtatagactgatcatctgaaagagcagcagttacggatttttagttttctttaatcctgttaataattgtcttcttattaacctcattcacttgaatttagttcctggtttaccttttcatttataattttcatttaaattattcaagcatggaacttattatgaacacctactggattcaaaagcacatttcaaggcaatataatctatacccttttcagtatttcagtttttctatttcattgctgtttgtggaaattactttcaatgagtttgagaatgaatatagtatcctccattaatggatttagtttcaggaaaaattttacttacttacttatttatttattgagaaagaatttcactc

SEQ ID NO: 13866 - DNA, 1357 bp, Homo sapiens
tggaacaagtttattgaatctctctgtcctgtcatcccaatactacagggctatgccgacacagaagatcctctgggtaactgcattctccttctaagcaaagcaagttctgacacagaagagatgcttccgtgtactacccgattaaagtccatgctgcgacttttgctagtgaaaaagccatcggtccgttcgctagcattaaagcttttagcattccatcttaccagtgaagaaggggctgatacaaagcgtcctctaatagacgccagagttctctccagagttactgatttattcattgggaagaaacctattgaactcagactggatgacagaagagagctggttattaagttggagactgttgaaaaggtatatgaaatcttcacctcagatgatgttgatctcgttttgagaaagtcagctgctgaacagttagctgtgattatgcaagatattaaaatgcatgctgtggtgaaaaagttatgcttaattgacaaaataattgagtatttaaatgaatgtgtgagtcaagatggcaaggttgtagaatgtttggtacaaccatgcctcacactcttgaggaaggttttatgtggtgatccagtcatgcgtgtttcgctctcgcaacagtcttctcttttgaccgtgttattcagagagacttaggccactgctttttgatattttgcaagagtcatgtagaatcatctgaatgtgctgaagagtcacgtacaagcatctgaatgtgcttcatcttgtctattatcaggcatataggagataagtgagatttatgttcaaaatatgttattataatgtagtcattttattttagcatcttttcctcctgttggcttctgcttgccaagtgagtaagatgcagtttatttaagtagcagccctaaaaccaggtaaagctctaaacagattcagtgtgtttaggctcataacattttgagtggactataacgtttttataagattgtatagactgatcatctgaaagagcagcagttacggatttttagttttctttaatcctgttaataattgtcttcttattaacctcattcacttgaatttagttcctggtttaccttttcatttataattttcatttaaattattcaagcatggaacttattatgaacacctactggattcaaaagcacatttcaaggcaatataatctatacccttttcagtatttcagtttttctatttcattgctgtttgtggaaattactttcaatgagtttgagaatgaatatagtatcctccattaatggatttagtttcaggaaaaattttacttacttacttatttatttattgagaaagaatttcactc

SEQ ID NO: 13867 - DNA, 5589 bp, Homo sapiens
gttgagtttttttgtccaatctgacattatttacagttttaatggaatattttaatgcattttacatttactataattactaatatttttggatacagattattagcttgctattttctatttgtccaatgtggtttttttctttctttttcctctctggcttttcttgattaatttttaaaattagtccatgttttccagctgttaacttgtagttacatatacattaagtattttatttatttatttatttgtagcgattgggatcttgctttgttgcccaggctagtcttgaactcctggcttcaagcaattctcccacctcagcctcccaaaagtgttgggattacaggcatgagtcactgtgcccagctaagtattcttctatatacattatttctatatattttatacagatgattattcttttataatatagagattataatttacttccttgactgtgaactagtatttttaccacatcccagacaatgcaaggaccttagaacacattaattccatttatttgctcttcttttttttttcttttattgtcaggtatttaaattctatacatattttaaattctataagatgttattataattattttatgcagtaaatagtcatttagatttgtataccgtggtcgtttctgttactttttattgcttttttggtttttctgcctccatctgagaatttgtttttttaagagttttttattatttaatgtagtgcacttatattagcaatgatttctgtcaggttttttttttttttaatctaaaaattctttctgttttaaaaaatgttatcactaggtatagaattctaggttggcagttggagtccatttttttgtaggaacattggctgtcagttttattgttgcttctttgaaggaactgtgttccccattctcttaggagttccttcagctatatcccacagcactttgcttgcttgcttatttatttgggggagtttattttatttttatgggtatataatagtacatatttatggagtacatgtgatattttgatataagcatacaatgtataatgatcaaatcagagtaattaggatgtccattacctctaacatttattgattctctgtgttaggaacatttcagatctgctcttctagttattttgaaatatacaacaaattactgttaactatttttaccctattgtgctactgaacactagatcttattccttctatctaaatttttatgtacccattagccatcccttcttaattccccccttccccaccatcctttacagcctgtggtaatcatcattctactctttatctccatgagatcatttttttttttttttagctcccacatataaaggagaacatgtgatgtttgtttttctgtgcctggattatttcagttaacgtaatgacttccagttccatccatgttgtttcaagtgacaggatttcattcttttttacatctgaatgatactccattgtgtatttataccacattttaaaaaatccattcatctattgatggacacttaggtagattccatatcttggttattgtgaatagtgctacaataaacatgggagtgcatatatctctttgacataccaatttcctttcttttggatatatacccagcagtgggattgttggatcatatgtaggttctgtttttagttttttgaggaactccatactgtttccaataatgactctactaatttacattcccactaacagtgtgtgagcattctccttcctccacatctttgccagcatctgttatttttttttgtcttgttgataaaagcctttttaactggggtgagatatctcattgtggttttgatttgcatttctctgatgattggtaatgttgagaattttttcatatacctgttggtcatttgtatgtcttttaagaagtttctattcagatcttttgcccagcttttaattggattattattattattattttgctgttaagttgtttgagttccttatatattttgatggttaatctcttgccagttgaatagtttgcaagtgttttctctcattccataggtggtctcttcactttgttgactgtttcctttgctatgcagaagctttttagcttgatatgatcccatttacttatttttgctttgcttgcctgtgtttttgaggtcttacttaataaatctttgcccaggctaatgtcctgaagcatttctctaatgttttcttctagtagtttcatagttgcaggtcttacattaagtctttaattcattttgatttgattttcatatgtggcgagagatagagatctagtttcatttttctgcatatggatatccagttttctgagtaccattcattgaagagactgttctttccccaaattatgttctcggtgcttttgttgaaaattgaccaaatgtgtgtatttatttgtgcattctttattctgttttattggtctgtgtgtctgtttttatgctagtatcatgctgttttggttactatagctttgtagcataattcagagttaggcagtgtgatacctccctctttgttctttttgctcgggattgttttggctatttaggaccatgttttgttccatatacattttaggagttttaaaatttctttttgttccttttaggatgcaaatttacatgcatgttagattatttcaccatgttaaaggaaaaacttgagacaaaatacacatgcatgtgtctttacggtagaacaaaattaactttggtttaaaagatactgctattgaatctgtttttatttctaaacatatttcttggttcttgttgaatttattgatgatgaaaccatgttctcaagtgaaaacaataagctggaattcagtcatttagtgacctctatgatcataggcaattcatttatcagctttaagcctcatttttgatcatttgtaaaataggtatcatagtgccataccatgtaactgtgaatgaatgatacaaaataagcagtgtttggcataaagtaaatatcagtgttttagctgaacaccttttatgtttggttcactgtattcatggtccctgacttcaaggagcattagttatctccacaacaactctaatatagcatagaatgtggtaagtcctcaagaaaggatttaagtgttctggggagtttagaggagatgaaaagaataattgaaatactgtataaattatgataattgtttaaaatagggactaagagaaacctttgcattattgtgggttgggaggcattgaactagccctcatttgtggctcatctttttgagtagcatttaagaatttgaaagtttgtaattatttgtacacattttctttaggtaccatctacctgttcatgtaattggacaccatgctgtgagtccttactccatagttttgcccttatctgctgattgtttggccttgaagccggtgtcagatatgctgagaatagcttggaacctgtcatggtatcatgggagtgataatctgttgaagcaaatgaactctgaaactaaaacgcaagaaattttagatgcattgaagttatctacagaggacatcctcactctgaagataacacacatggctagtgggctgcaggactgcctccattccattgttcaggctgcaacccacagggaagttagggctgctgtcaccaggatgagtttttatcttctgaatgacagattgtctttaaagggttgccctggtccatgtggggttaccttgaagtccttggcttggcacaccgcactaaacaggtttttacaggtgcttcctgcttgcactgaagatgagaaactgctaatagatatcatacattttttaaataaattaataaaggaacaaagaaaaaattcttcactagaacttctaaactggattctcgaattacttcttagacatagtgcaaacccactgttagacctcttggttctgacagagtcacaggcacgagaagaaacagatgatatccggactgctgtcaggcaacaacttcagaaagaactgattgctctttttgataccttgctgctcaatttcatggaagttactgacaggaaatgctcggaacttctttacgtttttcaaacgcagctggctctgaaactgctccagtgtctgaaagtgacggatgcgcctcatttctatggcctgccgtcccttgagcggaccttacgagggatggctaacctcactgcgtttccgggatggagctcacactctcctctcacaaagcctctagatatctgtgtgaagtacttgtcaggtctccttgaggtcattacttctttttatgtggagcgtggaggaaatgctatgtccttcatgggaaaaggtgttacaaagagcacaattctttgcttgcttcacttatcccatgagatgatggcccaggctgggagcttggagtggatgtcactttggttcttgcctttgggtagtcatagtgaagaacatattcctactcaacaaggattggcttggttgattccattatgggttgatcgggacccagaggtgagattcacttcactgggattaggatcagcactgaccacccttgaaacgggctgtgtggccttagcaaacagttgtcagaacatttccggtgggctctggggaactgtggtgaacattcttctggaccagtcagaatgtagtatggtgcgccgggaggcggcatttattcttcagaatctccttgtaattccaatgcctacagaaattataaaggattatacttggcagggtccctgtgttcatgatgaggactctggcctatcgctcattggaaaacctgcccttcaggctcttttatatcactgccatttttatgaacatttgaatcagatggtaaagcattgttacctaggacggtgtatgtttgatttgaatttttctgcttttgatagaaattcagaaagcaatgatttaaatggtaagtacgatatctttgtatttttatttttgtaatatgtaacttgtaaaaactgttaaaaatacatatatttgttttaaaaatttgaaaaatgaaagtatacagggaaaacattcatttccagttctaccacccagagagatgtattttcttcccgtcttctttctctgtatagcctttgtttgttttatgtaattatgttcatatcttgtgtacatttttgtatttccttctttcactaaatattctgcaagcatttttctatgttataaattcttcatggaaattatttttgacatcttattaatactttataagttatgcccatcagtacagttttatagtttctttctctgttaacgtctcaaacttttttggaactttcacttctaggcaatgtacagtttttttatccttcttgtgaatgagactttttcccactatattttctaattcattttgctcatgtatcaaaaagttatttattttagtatgttacttatttgtcacaatattttcctgaaacctttttattccttttgtttgtaggttcttgtagatttgctaagtataagatctgagcacataaaaat

SEQ ID NO: 13868 - DNA, 16959 bp, Homo sapiens
ggacaacaccctgttcaagctacacatagaggagccgtgagcaactctctgatgctgtgtatcctaaagttggcttcccagatgccactggagaacaccacggttcagcagatggtttttatgcttctttcaaacctggccttgtcgcatgactgtaaaggagtaattcagaaggtacgcacttaaactccccacatatcttaaaagggtactcagtgaaataatctttccaatcaaaagtttacaactcaatttctaagattattatgattttgaggcattttattttaaaggattataaaagggttaagaggttcactttgtttaaagccagttgatagatgacacgtgcagaaggacaggagctagagtagagtcataccatttccttctcatttatcttcttagctttcggattgtattttatcattctcaaagatgagggttttagaaagatagccgtcttacatttattggaaataataaaagtaatatattggtctttaaacagaccaaattgggcagtaacaatttcagtttaatttcattgacaaaatggtttatgaaatcacagcccacttcccccagttagacttaacttccttatggcatgttaagcaattttatgagttctctaggattccagttcccaatctagacttctcatcactgattttaacttaaggtaatttaaaagggatgtaatgagttaaataaattctagtacacatgtgcacttatattctgtatttagatgtgtataaacagaatccctaattgggaaaatcccttcaaatttgaatgtaatcagattatatactacttactagtattgtaatttgagtgtttccatttcttttacttgaaggccaagataaattgcagaagttgagagcatttataagaattgagtctccttttcctctactgtttcttctccctgaactcctcagaagatactttgttatcaccacataaatagaaagttcggtctttctaaggaaatggaaagatcaatcttaccaaggaaagatgttttcagtggcacgttggagccagcctcctactgactcatgagtgtcatcttaaatttgcaggaattttataaaaattccagttgatgttacattgttattttgaaatcagccacagtgggcatatcacaccacgtaattcagcgaactgtacaaatcttggatcttttctaccctcaccacaatcagttgtttatttaccagcacatggctggatattttcttcatgtatatgttcatgtatgtcatatatgtatatatatttgaatatattttcttcatatatgtattcatatacatgcatcacttccaaaatgagacattctcttgaactggatatatgtgattagcatccataagaatgagagattctgcatatgtgagagcagagcgggggcagtgctttccaccacttccttatagagcatgttggtgggaagctaagtgggagcacccagaaggaatgtaagtgccaatctcgagtctggtctgtgactttgagctggagacctattctctttcagcttcatttgggtttaacaaaataatctctaagatatgttcaactcttaatctgttattctggtgctatacttaagaatattttgatgaagtgtgatcagactctctttccagggacggattaatcaagtctttttcctctgctctaattaggaaatgcctgagacttcctctgctgcattaagtaataatgagcccagacacttaacacttctacttcttcattactcatctgtaggacatagaaaatgcagcaggtggtattgtacaactcaggctccgaaatatcctgcttgtttgtttttttttctaccatggtatacatctctacatattctacctggtgtaggaaattgtctgaaaacatctttagaagcagcaaaaaaaaaaaaaaaaaaaaaaaaaaggagtgcccacagcacatttatatttgagagcactgacatctgctttatcacccttgtcagtcccaaatccagcaagggttgaatctaaaaactgtcagtttggctgacagtaggtgtgagtgacagcacatgcagctgaaagtgggcatgtaattttacagtttacttattgtgtgggtaatgttgataatatttctgtagctcatttcattcttaacactcagagtccttttgtataaaaacgttaagtttattttatagattaaagccaacatcttgattttggtctaggaaaacctaagagataaactggagtagatttaaacagagagagagaagagttattctgtgcaatcataaaagttaagtgattgcatttcatttctaaaatgtccacctaactgtggtttccatgctgccatgggctgcagcttgatgcagcacttttatactttgcatatagattagtctaagcaataatttattatctttcttatagtgaagggtttggtggggttttttggaaggggctttatttggaggttgaaaagactcttacagttcaaataatagagctttctcatctgtaagcataatagaatgacgtgtagccatcagaaattcttacttgtaatgataagtacctgggataaagtgaatgtaagatgtatctatagatttgataaaaacaacaacaacacctgtagctataatgattcaaaataccctcactacttccagagttgttaactagtattcaagactgatttggatttttgccttttttccttccatagggtagcttttaatagcaaaatcaccagaaggcagagagaagagaaaactcaagagccctgaaataatctccaaacttaattaccaattctaaataattaagagttaactatagtatacttcatccatcatgaggaaataattagcaggaattaaaacttgagcactattttgttcttcttacctttttcacttatgcttggaaataatatagatggaatattcagaagctattagaaaggagaaattaatgtagagggagagtatatcagaatgttagttaattggtcaccaagggactaggaaaataatgaaaaagatgagaagaaaataatattctctctatttatccacagagtaacttcttacagaacttcctctctctagcattgccaaaaggaggaaataaacatctaagtaatctgactattctttggttgaagttactcctgaatatatcatctggagaagatgggcaacaaatgattctgaggcttgatggctgtctagacttactaacagagatgagcaaatacaagcacaagagcagccctttattgcctcttcttatctttcataatgtttgcttcagtcctgcaaataaacccaagatcctggctaatggtaagttttcacacacacatacatttatatatgtagttattcatagactgttcaggtcaacaccaaataattttataaataattttctaggcatttattaagcacccactgtgttcaaagcactgtggaaggcatgggaatgaatcaggcatggcttcagccttccgtgggcttccaggagtctcctgaggttagcaaatcatgtcattccagtgcacatactggacacctggaggaaggggagccgtggacgagggctccctggccttaccttctgctccctctcctctctccttgctcttcctctaactccagctcccctcttctgcatcttcaagcaaatgctactatgtcaatgaagcctctcgggaaccatgtgttaatataatagccccgcacccagggggccttctctttcctcctcctcactatttcctttcctggttttgtttccctccgtagtattatcgccatctgatagattatgtgtttcatgtatctgtctattcctagtcttcccacactagaaggtaagctcttatggggtcaggaggcttttgtctgctttgtttatgtgtagcacctagaattgtgcctgcaactagcgagcactcaataaatatttgatgattgagagagatcccaagcagaccggagagagttcagggcttgagatcagatggtgcagtgagcctcgcagagacttcattctctgagatgtaggacagatggaggcgaggattggtaaggattcagaaaaaaattgaagcaaaaagaatcggaaagatctttttctgcaaccatgtgttatctctgtgaggagtatgtgaatttcgtggggagtgagttttataaaagacatgtgttctagtgaaaaacagaaggtgggctccagacccctacacacctggtcttgaatgccagcactagggcatcactccagcgtcgcctggtgcagcctcgctgggcccagcttcttcatctataaaagaagcccactcttcttggtttggtaagaatcagtttataaacacacataaagtgcctagcgctatttctggtacatgataaatgtttaagatagattcattctcttgtttttttcatgtttttcacttaaacttttctcagaagcatttttctgtgaaatcaagggttttctaagtgtacgaaaatgattcttcttatattttgtggtgtatatagttgtgattctatttttctgataagcattctgataatcaactgctagatatgatatagaaggatgtttaaagttcagttagcttgtagcagacctaaccttactgtggattttgcactctgccttccggtggctgctgtgctgatgctgcgttctctgttgctgcgtgatgtacatcactggttttatttccatcctctcccactgtagctgcttcagccctcacatttgtaaaatgagggtgatgataatccctcctcagggcaatgagagagcctgtgaagtgtttgtgaccattcttggtatatagcagctactcagtaacatctgttattgtttattcacctttcttagaatgattttttttttctttgagggctacttactccagtttattattgagagttggaaaaaggtcaagctttttgagaagtgaaggagagaagtctgcattttccacttctagacccctctagaattatttttagcatttctttgtagtcagcaatgctttttctccttcattagcttaaagcagatggataaactttggtgagaagcttcccctagcccacagactagagatcagtgggcttttcaggcaggggtaagataagagacatcagctgtgcagtttctgtgtggaactataaagggatgtcacagcctatgcctcgctttccacttggggatttatggaggaggccttagcagagtcagccagcttaaaagtctcccaggaaaggctgcctctgatcggtagcacccacacatctggtttaaatggtcaggagtggagtgtgcagtggagcttgaccttgctggtaaaaatagatctggggcttggcatggtggctcacaactgtaatcccagtactttgggagaccgtggtgggtggatcatttgaggtcaagagtttgagatcagtctggccaacatggtgaaaccccgcctctactaaaaatacaaaaattagccaggcatggtggcgggcaccttgtagtccccagtagtagaattgcttgaactggggagacggaggttgcagtgagccaagatcgcgccactgcactccagcctgggcaacagagtgagacttcatctccaaaaaaaaaaaaagatctggaacattccttgtttctggcaatgccagactaagtctcttctgaaaacgacaataacatgctagacaggctgtattaaaatgcacctcaaaataatcacaaaaactgaaaagatagaaactcccagtccagttttgattgaaagtcttgcccagacaagtaagaagtatatagaaaattattttgccccaagtgcatttgccaaggttgtatgcttggcttttgttgaggagtatcgaggggtgagaggacagaagccgcgattccccaaagtggggattcttactggctatcctgcttgtattaagctggacctccaaagaaccattctcttaatagatggatgggtcaaaaataagttggtttcccaaacttcatgaaggagactgtaaagaaaaggaaaaaaaaaatgtgagaatgggtactacagactgcttctgatagggctctgcacccaaagttggccgtgaacttggcttgaggtgtcttcgattgatggtgcctgtgggtacttagcagaaagcaaactgccttggtgatggatgaaagacaagttcatactgggcctcagggaacctctacaaataatttttcaaaagcattaaccagtacaaagttagagataatcaagcacattaggagacatggcaacatgtagtaagaaacagcagaagaataaaaataccagcttatctgcccagactttgaatatgggaattacaaagcatgggtttaaaaataactttaattataccatatttagataaataaatgacaagcttgaaaattttaggaaatgggaaactgacaagttgaaatatttgaaaagaaccaaacagaacttcaagaactttactgtgcagtatgataatcagccacatgtagctatttaaatttaaactaattaaaattattcagttgtactcactacatgtggctagtggctatcttattaaatagcaagatataaatatttccattattgtaggaagttctgttttacaacagtaatctagaacttcagtggccaaaattgaaaacttaatatacatgtctgacagcaagttaggtatagcagagaacttaggaattagaagatagattagaaaaatattatccagaatgcagcagagaaagctaaaaagatgagaaaggatcaaaagaatcaaaggtaagtgacacagcagatatatcaagacagtctttgtgtttaatgaagtgtcctaggagaatgggagaggaaatatttgaagaaatgatgggtaaaaactttaagaacttttctaagacattaatgtcaccataactgacaactcactgtaattaccaaactgacatccctaaacttatacttaaaccaattgtattaagaaggtaatattcaattattatattaaggtaacattcaattattatattaaggtaatattcagttcaaatattcaaaaatactgtctcattatttacattttactactgtatattcactttaggttatttaaatgtttatatgagagttcagacctacttgttgaactcaaaattgttttattgctttgttatatgcatgtttcacaataacatttgttttgttaaaaaagtcgatccacttgcattatcagaggggcccaccacattaattcacacacacacacacacacacagacacacacacacacacacatatgtatatatacatacacacacagtactttattaaaaatgctttaagggatagctggttgaaggagttataaacttacttagatcagaggagttatatattctgagtgtttgagacaacatttaaaaacatcacttgatgctactcagatggaacataaggaagtcaccctcccatttaataaggggacatttgatgtgccctaatgagtagcacttgcagccataacctcacgtgataaattgcatctgcaagctatgtacatggcttggttctgggtaggttatgatacacgacaaccaaagggcatcagatagtgcagatgaggtgttcagggagtcggctgcagcgtgcccgaaacatcactgcacctgcctttcacattgtcctgatgcacatttccagttcactttagggagcagctttttttgttttgtttttgttaaatatttaaaatcccttaaaataaaaaaattgaattatgtagacaaaatttttgtttattctattctggaatctttcacacaacgaatatttattgagctcctaaaatacactagcattgtggttggtctaataccagtgagtagacactgccatctaactaataccagtgagcagacgttgccctgtaactaataccagtgagcagacactgccttctaaccagtaccagtgagcagacgctgccctgtaactaataccagtgagcagacgctgccctctaaccagtaccagtgagcagacactgtgctgtaactaataccagtgagcagatgctgccctctaaccaataccagtgagcagacgctgccctctaaccaataccagtgagcagacgctgccctctatctaacaccagtgagcagacgctgccctgtaaccaataccagtgagcagacactgccctgtaaccaataccagtgagcagatgctgccctgtaaccaataccagtgagcagacgctgccctctaaccaataccaggagcagacgctgccctctatctaacaccagtgagcagacgctgccctctaaccaataccagtgagcagacactgccttctaaccagtaccagtgagcagacgctgccctgtaactaataccagtgagcagatgctgccctctaaccagtaccagtgaacagacactgtgctgtaactaataccagtgagcagatgctgccctctaaccaataccagtgagcagaccctgccctctaaccaataccagtgagcagacgctgccctctgtctaacaccagtgagcagacgctgccctgtaaccaataccagtgagcagatgctgccctgtaaccaataccagtgagcagacgctgccctgtaaccaataccagtgagcagacgctgccctgtaaccaataccagtgagcagacgctgccctctaaccaataccagtgagcagacgctgccctgtaaccaataccagtgagcagacgctgccttctaaccaataccaggagcagacgctaccctctatctaacaccagtgagcagacgctgccctctaaccaataccagtgagcagacactgccctctaaccagtaccagtgagcagatgctacactcacagaccctgccttgaaccttttcctattttagtacccttatttatttatcttgcctgattgccctggccagaagttccaatactgtgttgaacaggagtggtaagaaatggcatccttgtcttgtgccagttttcaaagggaatgtttccagcttttgcccattcagtgtgatattggctgtgggtttgtcataaatagctcttattattttgagatatgttgcatcaatacctagtttattgagagtttttagcatgaaagggtgttgaatttttttgaaggcctttctgcatctgttgagataatcatgtggtttttgtcgttggctctgtttatgtgatagattacttttattgatttgtgtatgttgaaccagccttgcatcccagggatgaaacggacttgatcttggtgaataagctttttgacgtgctgctggattcagtttgccagtattttattgaggatttttgcatcgatgttcatcggggatattggcctgaaatttcctttttttgtgtgtgtctctgccaggtttttgtatcaggatgatgctggcctcataaaatgagttagagaggattccctctttttctattgattggaatagtttcagaaggaatggtaccagctccactttgtatgcctggtagaattcggctgtgaattcatctggtcccgggctttttttggttggtaggctattaattactgcctcaatttcagaacttgttattgatctattcagggattcgacttcttcctagtttagtcttgggagggtgtatgtgtccaggaattcatccatttcttctagattttctagtttatttgcatagaggtgtttataatattctctgatggtagtttggatttctgtgggatcagtgctgatctcccctttatcattttttattgtgtctatttgattcttctctcttttcttctttattagtcaggctagtggtctatctattttgttaatcttttccaaaaaccagctccgggattcattgattttttgaagggtttttcgtgtctctctctccttcagttctgctctgatcttagttatttcttgtcttctgtaagcttttgaatttgtttgctgttgcttctctagttcttttaattgtgatgttagggtgttgattttagatctttccccctttcacctgtgagcattttgtgctataaatttccctctaaacactgctttagctgtgtcccagagattctggtatattgtgtctttgctctctttggtttcaaagaactaatttatttctgccttaattgtgttatttactcagtagtcattcaggagcaagttgttcagtttccatgtagttgtgtggttttgagtgagtttcttaatcctgagttctaatttgattgcattgtgctgtgagagactgtttgttatgatttcaggtctttggcatttgctgaggagtgttttacttccaagtatgtggtcagttttagaataagtgcgatgtggtgctgagaagaatgtatactctgttgatttggggtggagtgttctgtagatgtctgttaggtccacttggctcagagttgagttcaagtcctgaatatccttgttaattttctgtcttgttgatgtgtctaatattgacagtggggtgttgaagtctcccatgattattgtgtgcgagtctaagtctctttgtaggtctctaagaacttgctttatgaatctgggtgctcctgtattgggtgcatatatatttaggatagttagttctatttgttgcattgatccctttatcattatgtaatgcccttctttttcttttttgatctttgttggtttaaagtcttttttatcagaggctaagattgccacctctgctttttttttctcccctgcttgccatttgcttagtaaatcttcctccatccctttattttgagcctatgtgtgtctttgcacgagatgggtctcctgaatacagcacaccgatgggtcttgacgcttcatccaatttgccagtctgtgtcttttaattgtggcatttagcccgtttacatttaaggttaatattgttacatgtgaatttgatcctgtcattatgatgctagctggttgttttgcccattagttgatgcagtttcttcatagtgtcaatgttctttacaatttgatatgtttttgcagtggctggtacaggtttttcctttccatatttagtgcttccttcaggagctcttgtaaggtagggctgctggtgacaaaatctctcagcatttgcttttctgtaaaggattttatttatttttcacttatgaagcttagtatggctggatatgaatttctgggttgaaaattattttcttgggccatacgcagtggctctcacctgtaatcccagccttttgggaggccaaggtgggcggaccatgagatccagagtctgagaccagcctggcccatatggtaaaaccccgtctctaataaaaatacaaaaaaattagccaggtgtggtggtgcccacctgtcgtcccagctactcaggaggccgagacagaagaattgcttaaacctggtaggcggaggttgcagtgagccgagatctcaccactgcactccaaacctgggagacagagcaagactgcatccccctccccaacaaaaaaagaaaagataaattctttaagaatgttgaatattggcccccagtctcttttggcttataggatttctgcagagagatctgctgttagcctgatgggcttcccttggtgggtaacccgacctttctctctggctgcccttaacattttttccttcatttcaaccttggtgaatctgatgattatgtgtcttggggttgctcttctcgaggagtatctttgtggtgttctctgtatttcctgaatttgaatgttggcctgtcttgctaggttggggaagttctcttgcatttaatatcctgaagagtattttccaacttggttccatttttccccatcactctcaggtacaccagtcaaacataggttgcttcttttcacacagtcccatatttcttggatgctttgttcattccttttcttttttttttttctctaatcttgtcttcacgctttatttcgttaagttgatcttcaatctctgacatcctttcttctgcttgatcgatttcgctattgatacttgtgtatgcttcacgaagttctcatgctatgtttttcagctcccatcaggtcatttatgttcttctttaaactggttattctagttagcatttcctgtaaccttttatcaaggttcttagcttccttgcattgggttagaacatgcttctttagcttggaggagtttgttattacccaccttctgaagcctgcttctgtcacttcgtcaaactcattctccatccaattttgttcccttgctggtgaggagttgtgatcctttggaagagaagagttattctggttttgggaattttcatcctttttgcactgggttttcctcattttcgtggatttatctacctttggtttttgatgttggtgaccattggatggggtttttgtgtggatgtccttttggttgatgttgatgctattcctttctgtttgttagttttcttcctaacgggcctctctgctgcaggtctttgggagttggctggaggtccactcctgcccctgtttgcctgggtatcaccagcagaggctacagaagagcaaagattgctgcctgctccttcctctggaagcttcatcccagagggcaccccccagatgccagctagagctctcctgtatgatgtgtctgtcaacacctgttgggaggtgtctcccagtcaggaggcacgagcgtcagggacccacttgaggaggcagtctgtccgttagcagagctcgagcactgtgctgggaggtccactgctctcttcagagacagcaggcaggaacatttaagtctgctgaagctgcacccacagccgccctttcccccaggtgctctgtcccagggagatgggagttttatctataagcccctgactgggcctgctgcctttctttcagagatggcctgcccagagaggaggaatctagagaggcagtttgggtacaacgtctttgctgagctgtggtgggctctgcccagtttgaacttcccagtgccttcgtttgcactgtgaagggaaacaggctacttaagcctcattaatggtggacacccctctccccaccaagctcgagcatcccaggtcgacttcagactgctgtgcaggcagtgagaattttaagccagtggatcttagtttgctgggctccatgggtatgggatctgttgagctaggccacttggcaccctggcttcagccccctttccaggggactgaacaactctgtctcactggcattccaggcactactgaggtatgaaaaatctcctgcagctggctcggtgactgcccaaatggctgcccagctttgtgcttgaaaccctgggccctggtggtgtaggcacccaagggaatctcctggtctgtgggttgcaaagaccatgggaaaagcgtagtatctgggccggaatgcaccgttcctcagggcacagtttctcagagcttcccttggctaagggagggagctcccccaccccttgtgattcctgggtgaggcgacaccccaccctgctttggctcgccctccatgggctgcacccgttgtctaaccagctccagtgagatgagctgggtacctcagttggaaatgcagaaatcacccgccttctgcattgatctcactggaagctgcagaccggagcttcctattgagccatcttgccagccaccctagtcatttttaaaaaacatcaagcagtgtgatatttgatgatcgtttttgtatagtagctcatgctactgatgtgtttgtatgatagtctttataatttatcatgaaagcagatctgtttttctgcctgccagaatgttagctgtaattgagtaactcattaatgtacctaattgtatacttatttttacacacttgtggtctttaaatgaatgtgccttttcttgaattctggccaaaaaatgaagcagcttcagtgtctttgacccttctatgcctgacatgaaaacaatgttttgaggttgtcctcccatataccacatggcataaaagattggttttgccatagtctagtgataccaactttatgtatgcattctaatgggaaaagaggggggtgtctgactagtccaagataagaatacaatgcagtgtctgggactgaacttttaaaaaatatatgttcatttttagaaaaagtcattactgtgcttgctgcctgtctggaaagtgagaatcaaaatgctcagaggattggagcagctgccctttgggctctgatttacaattatcagaaggtcagttttaaaaatcattgttacacctggggagcaaacaacaaggtataacccaggtataaactcttaggatacatccaaaggtgtcaagagttacagcaaaagaaaaaagacaaaatcaaagatccatgttccctttgctgattcatacaattagtaaaccatcagttgaaatctttttatttaatcatttcaacagaatgtctcagtttagaagagaatctctgaactgactttttcctcttaatttaaattgatttactttattattgcaattttagtatagattgtttcttctaaaagacgtatcaagggaaaacacatcttaaagtaaaactgagtaacaaaagttttatccaattgtacaattcccctttatctagctcagttcttgtacgactgcagcccaaagcctgctctgagaaaagggcaggcaacgtggagatttgtgttctactctttctctggcctttggacttccactttattgcagacatgttgttcccaagagaaatacccataagtatctagtgattaagtagtagccaagtgacagtgttaggatagacagccatcctagaatggtgttctctcagctgactgtctctgccggggctagttttctccctgctggccagagtcacgtacacaaggacaagagggtgttgttttctttctcacctgggtatccccagagcttagcacaggatttggcactttgtagtcactctgtaaatatttgttgaccaactgctaatatttggtatatgtgatcagaaatctgaggtttgagggagtatgaaaaactgaaaccaaggatgactagtttaaaatagcaaattgagattaggggagaaggagtaaaagagaagggaagaaagaaaatgggaatagagaaagaatcaagttagataagaggatatgggcaagacttcagaatgtgcaaggggattggctcaataggatgtattatgctaagatggaactctctagttatattattatatttcataatattctgtttaatactgtagttagcaatgggcagaattagtgttttgctatcatgatccataacacatggcaagaaacctaattaatggattgttctaggcaaaaacagctttgaaaagcccatcagtaaaaagaagagtggatgaagcatactccttagcaaagaaaagtaagttgcaataagaaagagattatagttaaactcagaagctattaagtggattttctgattaatgagatatttggacaggccacagcaaaatggcattgtaaaatgtgccaatattcagtatgtgctttaattatatcattttttaaaataataaaatagatagatgaaggtttaagatgtgattgcttctaaaaatgcatctgtgatcttcgtcttatttttgtactaaattttctttgccaacagtgaccactgtgctgaagtatgttcttagtgataagaactggcccaattagaattaactgtgagcagaaaacctggatctaacatcagggagctggaggacagtcttccaagaattgatcctgttacccttatatccacgtttccctgtgatgtggtcacaatactagagacggttttcttttcaaagcacattattcatttttagtgacaccaaatttcagtgagcgttattctctgaacattttttatgctaaaacactgaattgtgtctttcctgtactgtaatatatctgttggttatttgtgtttttatagtctgatttttttttttaagcaggggaggttttagtttgttttagctgcgaccatgaatttctggagctagtgaagttaaagattatgctttaggaaggatggtacataaaaaaagattaatggcattcatttggaattatagttaatggtatccattatggggggtactttttaaaaaatactctgggtaagctgttaatttaaaaaaatattgattttgtaacttgtttattttttaaaaaatgcaaaatattctggaatgctattacatcaagaacttagagctttaaattatatataaatcctgttcatatgtatttgtttatgtgtgtgcctcctaagtatagtaccaagtttcataaactagtatttctgtactcttatttttctatctcagctttcccaaactcagaagcaaaccctctaaatgcctattatttgaaatgtcttgaaaacctcgtgcagctccttaattcttcctgagtgccatgggatgctacaccttgaagctgacagtcatcaacaggggagctaaagttgaagccagctgtgtgtagcagctgttacctgaagacgtgctacctctctacaaagtgttgatccccttctttcccatgagagagagaactggtgatactccaacaccgtccagttgtggcagctctccagaagtaatagcagctgacaactttctgtgccttttcctttctgttgaaaaggcatagaaagttctgggaacataaacatttttacccttttctatgccatttattttgtaaaaatcctatttaacagttatttaat

SEQ ID NO: 13869 - DNA, 2136 bp, Homo sapiens
ggacaacaccctgttcaagctacacatagaggagccgtgagcaactctctgatgctgtgtatcctaaagttggcttcccagatgccactggagaacaccacggttcagcagatggtttttatgcttctttcaaacctggccttgtcgcatgactgtaaaggagtaattcagaagagtaacttcttacagaacttcctctctctagcattgccaaaaggaggaaataaacatctaagtaatctgactattctttggttgaagttactcctgaatatatcatctggagaagatgggcaacaaatgattctgaggcttgatggctgtctagacttactaacagagatgagcaaatacaagcacaagagcagccctttattgcctcttcttatctttcataatgtttgcttcagtcctgcaaataaacccaagatcctggctaatgaaaaagtcattactgtgcttgctgcctgtctggaaagtgagaatcaaaatgctcagaggattggagcagctgccctttgggctctgatttacaattatcagaaggtcagttttaaaaatcattgttacacctggggagcaaacaacaaggtataacccaggtataaactcttaggatacatccaaaggtgtcaagagttacagcaaaagaaaaaagacaaaatcaaagatccatgttccctttgctgattcatacaattagtaaaccatcagttgaaatctttttatttaatcatttcaacagaatgtctcagtttagaagagaatctctgaactgactttttcctcttaatttaaattgatttactttattattgcaattttagtatagattgtttcttctaaaagacgtatcaagggaaaacacatcttaaagtaaaactgagtaacaaaagttttatccaattgtacaattcccctttatctagctcagttcttgtacgactgcagcccaaagcctgctctgagaaaagggcaggcaacgtggagatttgtgttctactctttctctggcctttggacttccactttattgcagacatgttgttcccaagagaaatacccataagtatctagtgattaagtagtagccaagtgacagtgttaggatagacagccatcctagaatggtgttctctcagctgactgtctctgccggggctagttttctccctgctggccagagtcacgtacacaaggacaagagggtgttgttttctttctcacctgggtatccccagagcttagcacaggatttggcactttgtagtcactctgtaaatatttgttgaccaactgctaatatttggtatatgtgatcagaaatctgaggtttgagggagtatgaaaaactgaaaccaaggatgactagtttaaaatagcaaattgagattaggggagaaggagtaaaagagaagggaagaaagaaaatgggaatagagaaagaatcaagttagataagaggatatgggcaagacttcagaatgtgcaaggggattggctcaataggatgtattatgctaagatggaactctctagttatattattatatttcataatattctgtttaatactgtagttagcaatgggcagaattagtgttttgctatcatgatccataacacatggcaagaaacctaattaatggattgttctaggcaaaaacagctttgaaaagcccatcagtaaaaagaagagtggatgaagcatactccttagcaaagaaaactttcccaaactcagaagcaaaccctctaaatgcctattatttgaaatgtcttgaaaacctcgtgcagctccttaattcttcctgagtgccatgggatgctacaccttgaagctgacagtcatcaacaggggagctaaagttgaagccagctgtgtgtagcagctgttacctgaagacgtgctacctctctacaaagtgttgatccccttctttcccatgagagagagaactggtgatactccaacaccgtccagttgtggcagctctccagaagtaatagcagctgacaactttctgtgccttttcctttctgttgaaaaggcatagaaagttctgggaacataaacatttttacccttttctatgccatttattttgtaaaaatcctatttaacagttatttaat

SEQ ID NO: 13870 - DNA, 7785 bp, Homo sapiens
aatttccagcagatggaagtgccgccacgaccagtgggtgtgtatatgtcgggaagtaaatcctgttgacttgggaagttgaaaattaatgtacttttttcgttattgtgaagatgtatttttaccaaacttgaatgtttcagcaccaaactatcattaaatgttttagttgtttcaagttagtttaggatatcgagtagaaatgataaaattttgtgttattctaaccatatttgaacaactgtgtagatggatggtattaatggcagtagtatgtcgtactgaatgaacatgagtttttttttttttttttttttttttttgagatggagtctcgctctgtcgcccaggctggagtgcagtggtgggatctcggctcactgcaagctccgcctcccgggttcacgccattctcctgcctcagcctcccaagtagctgggactacaggcgcccgccactacgcccagctaattttttgtatttttagtagagacggggtttcaccgttttttttttagccgggatggtctcgatctcctgacctcgtgatccgcccgcctcggcctcccaaagtgctgggattacaggcgtgagccaccgcgcccggccgaacatgagttttttgaggcattgtgccctgcactacacatgtcatctcatttgttctccagcttaacgatggcaccatctatccagttacgccagccagaggctgaagatcattttagtttcttttcccatttcctcaccacccagttaattaaaaagttctgatttagaaccctgtttctggaatctggaatctcatctccatctttttgtatctggctgtgttcagcctcagctcacatgccacctcatcagagaccttcctggtgattctagccagtgatcacttcctatgtgtagttttcttcctaacacattattttttattatttttgttttaagtttgataatagccgtgaacattgcattattttcagtgtctggaacaataccaaaaaatgtattaggcactcagtatatattctttgaaggaatgaatgaatcctcctggagtgtctttgagattggtattattagtgaccacattttactaataaagacactgagattagaaaggttgaaaactttgtccttggtgaggcagttaggaagtagttaagtaatcacgtacttaccattttcttgcctgcacagttaagttgaaaaggatatgttcaagagtatatctgctgatgtcacatattcaaatgaactccatttggaagcctctgttattaaaaagctttcatggaaactcacaggtggaataacaagaaagaactgaaaacttgttaagccattagaatactttaccttttcattcattgttaggcttgtagcaagctttgtttttgaggccagatggctgagaggcttaattccatcaagatgagagacatctgaagggagggggaatctctagggttggtaaaggatgggtgtctgaatgaagccgatgaaaacattaagggggattgagattgttacacttttatgtgagttgcagtttgtcttgattgagggtctggcttattttggacacatttttactgtgtggtgtaagcctgtccttccctccacccacctctccttatttccttagaaagtaaatcctgcttttatgttagcaattttgaaagaagtaactgtgctatgtttgggaatttaataatactgctatccacatttagcgattccatgctcttttcaaagcacttggcagaaagactgccatttggaaggacttatgtagatgctatttctcagtgttgccaccttaacttgtactatataagatctgttaaaaataacttgcatggggatagtttaaaactgttgctttctcagatttcttttaatcttgttcgaacactgatacttgttttttgaccttacggtcttcaagtcatcttcgcagaggtttaaaacacctgacaccatataggatatttgaacatggctagatatggtatatcattatgttttatcatttttaattttgaaaagttaaggttttccctaaatgtcagttccttttatgttgaatttaagtttgatgttctggtcagccacagggtaaaatagaaaatttaatggaaacttcatatgtcagtctgtattggattgtgtttaatgctcttcttctaatacttattttgatatcatatgagttctgtttaaattatgaaaagagaactctcttatttatcctgtgatagaacaaatttgcagctgaccttgtttggtatattttaggttactgtaagatgcagcctttattttgggacttgttttaaagggaaaacttactcttaacattgtgaatctgtcatctctttattctttgataccataagatttgctctttcactgacagtaaatcagactgtgaagtgcttgaagttttctacatttccttggctacccctgaccaccacagacagacatgtcctctcctctaatgaaaggtacggtgcttgatgtattttcaggtatttttgttcacttatagtcattaagtttgatagttattacaatatgttttaccaggaaaagatactagtggcagtgaaaggtagtaatggtcatatttaaatgatttttatttttcaaaaagctagccagaaaaaaattcctatttgcttttaatcaatctacacatcaagtttcttttatttatttatttatttatttttgagacagagtctcactctgtcacccgggctggagtgcaatggcaccatctggctcaatgcaacctccgcctcctgggttcaagcgattcttgtgccacagcctcctgagtagctggaattacaggcacgcaccaccacgctgagctaatttttgtatttttagtagagatggggtttccccacgttggccaagctggtcttcaactcttaatctcaagtgatccgcccctcttggcctctcaaagtgctgagattccaggtgtgagccactgcatttggcccacgtttctttttgtggttggactcttgtgtagtccttggtgacaggagttttctcttattggccagattctcttattggccattgcttatgcccttgattgataaaaatggaaaattgaacataaatgtagtctttttggcagaatatatttcaaaatgtgggcttcattaggagacaaattaaaccatgtggataaggttgggtaccactgatccaatctaatgtaatgactgttaattgattgctacccacaagagtaaatagctgatatatagagatttagagagtattttaatgtccagattcactttgtgcagtttcataaatgccacaatacacgagttatctgcttttttggggtataaatctggaaaataaagaccaatttactagggctaagtccagattacaggtggatgccattaagtgatttttaataatgacatgaattctcttggaacaacatattcgagaggcaaagtgcacatgggaaagggttaggaggttgtatgatctctcagttttgagtcagtcccaaaggcagagatggcgataatttctaatgcatgcctgtagatagtgaatggtggatagtataatggaactgggctgagagaaggggtgtgatttttttggggtggggagtgaacaactgccaatcctaggtgggcagaagttgataggtgtcctctgtatgggataagaggggagtcctaatctgattcaccttgagtggggaagatcagtaaggactttaattcttagaatttgcctctgtacttttgttctgtctcatttcttaatttatttggcagatttcctagaattgtgtgctctttgacctcattgaactcgttttgcagacttgtgataatctctgagggtacagtgtttagtatgatgtcgttcctgctcttgagagggtctagtggggaatgcaaaatcaacaggcagttaacaatatcacaaataatggacaaacggaaggagcactgccctagagttgtttattggttagggaaaagatctaggaaggcttttctggagaagtgatatctcagctgagacccaaaagattgttaatggagtcattgtgtcagtaggctacttagaatctggaatagatgaactcttcttaaaaatgattaacgctatgttttgtagctctttaagaagtagtaaccacactttaatctggaacacctgtgaactattgaaggatgttatcatgcaagattttcctgctgagattttccttcaaaggccaaaaattgttcaggtcagtgccctctataattgttttagattttgaactagagaactttttgcaataaagcaaattttgcagagtaggagttcttgggaaggaactttgtactcatgtttttaaaaagtgaagtatttggctatttaaagcacttattcgctaacttgggtggatagttatagttcttccaatagtagtagtttcatttgacacttgcagtccagtctggccaccttgagttaccatttatggatcacctaaatggtagagtagactttggacattgagattgtgcaggagcccttattaaaagtaagaatagcattgcttcttgagtatctcgtttatttaacgcacagtgctacatgctgggaaaatacagtagcggtgagtaacgcagatggattcttttctttttttctagtttattgcttgtatagtagagagagagggatccagggtggggaattgcaacatcttcacagcagccagtaatggctcagcattctcgctccacactcccagggctgaaatggactccagtgggtgccaactgttaatacctaggatcaaagctggcaaatgatcgcagaggaaagctgttaattactaaaatgtggttaaatggtttagatgcttgagatgaaaagggcttgctgtgatttttaaaatgttctctgtaatgtaatgtcctgagtggggaataatttctgtcttctctcagaatggttactcaactaacagattttagaaataggaaacactgactattctatttaaatgttgttgtcttattttattttgacccatctccttgctttatgccaagtcatatttgcccatttcagtttcttatgtcttacaaatatttggcaacttattttctcttgattattcacttaggcttacttacttaagctccacattctgctttgaagttgagctctttgttcccttagtaattttcacggctcttcttgatttcagagccttttatctctgttgaaactggcctttggagatggaaagcatcgcctggcattacagtcggtgtcctgcctgcagcagctgtgcatgtatttaagaaacagacttaactttcaccgagatccaggttttttctccaataaacacggtatttatttttatctgttcattagccactggtgttatttgtagattcttctgggaaccttccattatagttactgttagggtttattgtgtacgcattttcacaacataaactccccactcctaaatgtattcaaatgattatctttacagattgcgtgaatgacagaaactgccatgatctcttgagcctttttttttttttctggataagagatatttacaaggtgtttttcttttttctcccaaacttgcagagattctatatagtgttgttgggatgtagtgactcggatatttggtatggctattcatgtaggactttggacaatttagcaagttacatatagtgttaatacattgttttgtttgaaaaatattgatttgaattttatgaagagtatttttatgcaacttgcaatgtagtcaagtgttgcagcaatgtgagacttcagagaaaaagtgccacctaatggccaaatagagtaccagcctggcttcgacaaaaccagtaccatttaggatttttgtgagcttaatgcaacctgcatcgaaagtcaaatattatagtcatttgtcatcatgtttcatagttaatccctatttcattgggagtttcactgatcctgtgctacttgaatatttatgctttaccttggttttattctagatcttagagggtatggcattgtacaaatgactggtaatagagaacgtctgggtaccccatacttcaacagaaaaagagttacaatgttgatttaaaaagttgatatctctgaagaattgttaatgtatttaataagtatgtatttattacctgttttatgcccctgatattctagcctctagggaagtataacactgaacaaacgaataagatccaagcccttatgagcttctattttaaaaggctgggcacaggtgataaacaatcaagtttgcttgagataaggagaagtacttgaaggaaataaaaagggtgatgtgacagaatgtggttgggtaaacatagcttcatttaggatagtcagggaaagtccctcagaaagcttctattttaaaaggctggggacaggtgataaacaatcaagtttgcttgagataaggagaagtacttgaaggaaataaaaagggtgatgtgacacaacgtggttgggtaaacatagcttcatttaggatagtcagagaaagtccctcagaggaggtgacctgaagggtgacaaggaatcgtcactcgaagagctgcaagaagagtgttccagggaaggccaggcctcaaggttagcactgagggtgatgtccttgagcaactgaaataaagcccatgagagtggactgcagtgagctgggcagaagaggagaatgaggtgacatcagagaggtagttaggggccagagtatattggggcttgcagatctttttaaagattttatattttctttgaagtgtagtgagaagctcttggagagttttttttccccctctctctgactgtaaatgcttttattacctaattctttttttaaattggggtaaaataggtataatataaaatatgccattataaacatttttaagtatacaatatagtgacattaataacattcacattgttgtgcagccatcaccactatctgtttctaaacctcttcattatctgaaacagaaactctaatcattaagcagtgattcctcatttttcctttccccaaagctggtaaactctaatttactttctgtctctgattttgtctattctaggtacctcatctaagaggaatcatacagtatttgtccttttgtgtctggtttatttgtaatgttttcaagcttcatccacattgtagcttgtatcagaacttcattcctttatatggctgaataatattcctttgcatgtatatcccacattttattcatctatgcatttgtcgatggacatgtgggttgtacccacatttggcggttgtgaataatgcttcagtgaacattggcatgcaagtatctgtgcagtgcctggtttcaattcttttgggtaatacccagtgaataatagtgaaattgctgcgtcatatggaaattctatctttagctttttgaagaatcaccaaactattttccacagcagctgtaccatttacatttctatcagcaatatataaagcttccagtttttccacatcatcactgacttgttcatttttttcttttttaaaaataatcgtagtcatcctagtagatgtgaagtggtatctcatggttttgatttgcatttctctaaagacctaataattaatgaccaatgaatctctaataactttttatgtgcttattgtttgttcatgtatcttc

SEQ ID NO: 13871 - DNA, 982 bp, Homo sapiens
aatttccagcagatggaagtgccgccacgaccagtggtaaatcagactgtgaagtgcttgaagttttctacatttccttggctacccctgaccaccacagacagacatgtcctctcctctaatgaaagctctttaagaagtagtaaccacactttaatctggaacacctgtgaactattgaaggatgttatcatgcaagattttcctgctgagattttccttcaaaggccaaaaattgttcagagccttttatctctgttgaaactggcctttggagatggaaagcatcgcctggcattacagtcggtgtcctgcctgcagcagctgtgcatgtatttaagaaacagacttaactttcaccgagatccaggttttttctccaataaacacggtacctcatctaagaggaatcatacagtatttgtccttttgtgtctggtttatttgtaatgttttcaagcttcatccacattgtagcttgtatcagaacttcattcctttatatggctgaataatattcctttgcatgtatatcccacattttattcatctatgcatttgtcgatggacatgtgggttgtacccacatttggcggttgtgaataatgcttcagtgaacattggcatgcaagtatctgtgcagtgcctggtttcaattcttttgggtaatacccagtgaataatagtgaaattgctgcgtcatatggaaattctatctttagctttttgaagaatcaccaaactattttccacagcagctgtaccatttacatttctatcagcaatatataaagcttccagtttttccacatcatcactgacttgttcatttttttcttttttaaaaataatcgtagtcatcctagtagatgtgaagtggtatctcatggttttgatttgcatttctctaaagacctaataattaatgaccaatgaatctctaataactttttatgtgcttattgtttgttcatgtatcttc

SEQ ID NO: 13872 - DNA, 12184 bp, Homo sapiens
atggttcaatttcccgtccgttccgatgaaggaagaggttctgaacctgttaagcagattggttaaggtagggtcattttgaaataaagaaaataatcagacgagtgacttgtttcttagtcatttaattgtagcgtttattgaaagttaaataattggggttaaaagtttttttaatcaaccagagatgtttaattttaattaatctgggtatatggttcatcttttatttgtgatactgaatcccacatggtctctgctgtgctcagaagtaacacagaacttcttttgagttttggtatgttctgtgtttttgagttatctttggaggttaatatttgtattctgtttttgttttctgacatttacatcttaaaaactagatatgtcagtatgaaagggagcactttaaaaataatgttacataaccgtgattcataaataccaatgttaagttgcttgcccatatgcttttagattggtattcttatgcctacctcaagagtagttagttatcggggtcagatatcaaagtgtaagtttaacctttcaaaactaaatcactgtacaatggtagaggaatcttaaactactttgacatcctgttgaccggttggggctgggaccataaggtgagtgtcagtggaaaaaagtaacccattaaaaaaataagagtagggattgataatgtgcatttctagcgttcagtgtgttggctcatctttcataaatgttatcaagtgttggatgtatgtctctataggtgtatgtgctcctcatggaagtgccttacttcggggcagagccatgaaggatttgtttttcagaaaaggaacatctgatataccaaaaataattttatgttttgattgctgtaagttatagagattttgatacagttattctcaagatcatcctcttcttattttagtatcccccagcagtccaacatttggttgacgttggtgcagtagagttcttatctaagcttcggtctaatgtggagccaaatctgcaggctgaaattgatggcattctggatggactttttcttcttccttcggaagttcctgcactatcttctgcctcataccaaaccaatcaaactggtaactctttggaatctgttaaatacaaatatattaattctaatggtaaattttaaggaaagggagattagatttttttaaaaaggatttctcccacctcccccaaacttatttttcttgtgttaacttacatgattttgacctttttcccctcctctactgttagtcaaaggatggtacatttgcattaattgctttttgggtcaggcctaaacgatgccagtgactttgcttttatgaggccagtttgacagattatttttttggcaataacaatgtatttttattgagcacatgagtgctcattgttcttagtgctttatatttgtatttttgaccttgttcgtcatattggagtataatgatatctgtcctagctcatgatcttgttgtggggaccaatcaaaacgacataatgcaagtatttttatatgctgcagtccatcatgatatacttgttaaaatccaagtcaaagagacatggatttaagtctcagttctgctgctagttgtgtgaccttggctaaggtaattaacccttccaggcttcagttttctcattcaaaaactgggataataagaaagaacaccgggctgggcatggtggctcacgcctgtaatcccggcactttgggaagccgaggcaggtggtcagaagttcaagaccagcctgaccaacatggtgccccgtcactactaaaaatacaatacaaaaattagccggacatagtggcgggcgcctgtaatcccagctagtagggaggctgaggcaggagaatcacttgaacccggggggcggaggttgcaacggtgagctgagatcactccattgcactccagcctgggtgacagagcaagactccatctcgaaaaaaaaaaaagaacactttctcatagaatcgtcatgagattagatgagacaatgtctgtaaagtgcttagcacagggcccagcatgtatgaaatgtggctgtgttggctgctgtgctgctgctgttgtgttgttgttaatgcctagtatagtgccttgcacatggaatgcatttgaattgatttgaagaaaaacatcttcatgcaatttatgtgactgagtagtaaaagtaaaaaaaaaaaaaaaaagttttgatgcttaacctgttagaccatattttcttctctgccagtactgttacagcttcagctgtgggtactgcggttcacaacaacaatagcagctgtcatttattgagttttgttgtgggcattgaatacattgatttaaacacatcatcttgttaaatcttaaagcagccttttgactgagatgttattagtcttactctatagctgagaataaaagtataaagtaacttgccccacagtaccaagttttctaacctgtagcagatgcaggattctaacattgctttatctggctcccaaacctgtgatttttaacaatatattttacagtttcgaagacatcacaaataaagtagagtcttacactgtgaatttttaatctgattccttgcgggtgaaagtagaggaatggtttagggctaaatgttatttttctttattagtgttaggaactattgccatgaaaacttaaaattacaaactatagttttagccttttcctcattttcattgcagctgaactgctgaacatataatcgcatgttatagggaattgtaaaggtattgaaagataatatttgactcctttgtttttgacaactttctttttaaggtatgaatgaaaattgaagtgatcaggaactatataattggagtcaagggagagggagatggattaggaagtagagagggatagtccttgaatactttgtagcagattcttcgtgtacattctaacaaataactgtgtttggctaacagtaaaagtgagagggaaaaagcttcttaactggaagtgggctcaatgtgcacattttttcctctttagcaagatagatcattcagaaaaaaaactggacttttttttaatttttaaaatgattccaatacttaagagaaaacattaccacttaaagaaagtaagtttcacttttagcaaataaggaatcgacaatacagtaatgtttatttccttttcagaattgtcaaaaaaccctgaaatcttaacaggatattttccccaagacaaaagtaatttccagcagatggaagtgccgccacgaccagtgggtgtgtatatgtcgggaagtaaatcctgttgacttgggaagttgaaaattaatgtacttttttcgttattgtgaagatgtatttttaccaaacttgaatgtttcagcaccaaactatcattaaatgttttagttgtttcaagttagtttaggatatcgagtagaaatgataaaattttgtgttattctaaccatatttgaacaactgtgtagatggatggtattaatggcagtagtatgtcgtactgaatgaacatgagtttttttttttttttttttttttttttgagatggagtctcgctctgtcgcccaggctggagtgcagtggtgggatctcggctcactgcaagctccgcctcccgggttcacgccattctcctgcctcagcctcccaagtagctgggactacaggcgcccgccactacgcccagctaattttttgtatttttagtagagacggggtttcaccgttttttttttagccgggatggtctcgatctcctgacctcgtgatccgcccgcctcggcctcccaaagtgctgggattacaggcgtgagccaccgcgcccggccgaacatgagttttttgaggcattgtgccctgcactacacatgtcatctcatttgttctccagcttaacgatggcaccatctatccagttacgccagccagaggctgaagatcattttagtttcttttcccatttcctcaccacccagttaattaaaaagttctgatttagaaccctgtttctggaatctggaatctcatctccatctttttgtatctggctgtgttcagcctcagctcacatgccacctcatcagagaccttcctggtgattctagccagtgatcacttcctatgtgtagttttcttcctaacacattattttttattatttttgttttaagtttgataatagccgtgaacattgcattattttcagtgtctggaacaataccaaaaaatgtattaggcactcagtatatattctttgaaggaatgaatgaatcctcctggagtgtctttgagattggtattattagtgaccacattttactaataaagacactgagattagaaaggttgaaaactttgtccttggtgaggcagttaggaagtagttaagtaatcacgtacttaccattttcttgcctgcacagttaagttgaaaaggatatgttcaagagtatatctgctgatgtcacatattcaaatgaactccatttggaagcctctgttattaaaaagctttcatggaaactcacaggtggaataacaagaaagaactgaaaacttgttaagccattagaatactttaccttttcattcattgttaggcttgtagcaagctttgtttttgaggccagatggctgagaggcttaattccatcaagatgagagacatctgaagggagggggaatctctagggttggtaaaggatgggtgtctgaatgaagccgatgaaaacattaagggggattgagattgttacacttttatgtgagttgcagtttgtcttgattgagggtctggcttattttggacacatttttactgtgtggtgtaagcctgtccttccctccacccacctctccttatttccttagaaagtaaatcctgcttttatgttagcaattttgaaagaagtaactgtgctatgtttgggaatttaataatactgctatccacatttagcgattccatgctcttttcaaagcacttggcagaaagactgccatttggaaggacttatgtagatgctatttctcagtgttgccaccttaacttgtactatataagatctgttaaaaataacttgcatggggatagtttaaaactgttgctttctcagatttcttttaatcttgttcgaacactgatacttgttttttgaccttacggtcttcaagtcatcttcgcagaggtttaaaacacctgacaccatataggatatttgaacatggctagatatggtatatcattatgttttatcatttttaattttgaaaagttaaggttttccctaaatgtcagttccttttatgttgaatttaagtttgatgttctggtcagccacagggtaaaatagaaaatttaatggaaacttcatatgtcagtctgtattggattgtgtttaatgctcttcttctaatacttattttgatatcatatgagttctgtttaaattatgaaaagagaactctcttatttatcctgtgatagaacaaatttgcagctgaccttgtttggtatattttaggttactgtaagatgcagcctttattttgggacttgttttaaagggaaaacttactcttaacattgtgaatctgtcatctctttattctttgataccataagatttgctctttcactgacagtaaatcagactgtgaagtgcttgaagttttctacatttccttggctacccctgaccaccacagacagacatgtcctctcctctaatgaaaggtacggtgcttgatgtattttcaggtatttttgttcacttatagtcattaagtttgatagttattacaatatgttttaccaggaaaagatactagtggcagtgaaaggtagtaatggtcatatttaaatgatttttatttttcaaaaagctagccagaaaaaaattcctatttgcttttaatcaatctacacatcaagtttcttttatttatttatttatttatttttgagacagagtctcactctgtcacccgggctggagtgcaatggcaccatctggctcaatgcaacctccgcctcctgggttcaagcgattcttgtgccacagcctcctgagtagctggaattacaggcacgcaccaccacgctgagctaatttttgtatttttagtagagatggggtttccccacgttggccaagctggtcttcaactcttaatctcaagtgatccgcccctcttggcctctcaaagtgctgagattccaggtgtgagccactgcatttggcccacgtttctttttgtggttggactcttgtgtagtccttggtgacaggagttttctcttattggccagattctcttattggccattgcttatgcccttgattgataaaaatggaaaattgaacataaatgtagtctttttggcagaatatatttcaaaatgtgggcttcattaggagacaaattaaaccatgtggataaggttgggtaccactgatccaatctaatgtaatgactgttaattgattgctacccacaagagtaaatagctgatatatagagatttagagagtattttaatgtccagattcactttgtgcagtttcataaatgccacaatacacgagttatctgcttttttggggtataaatctggaaaataaagaccaatttactagggctaagtccagattacaggtggatgccattaagtgatttttaataatgacatgaattctcttggaacaacatattcgagaggcaaagtgcacatgggaaagggttaggaggttgtatgatctctcagttttgagtcagtcccaaaggcagagatggcgataatttctaatgcatgcctgtagatagtgaatggtggatagtataatggaactgggctgagagaaggggtgtgatttttttggggtggggagtgaacaactgccaatcctaggtgggcagaagttgataggtgtcctctgtatgggataagaggggagtcctaatctgattcaccttgagtggggaagatcagtaaggactttaattcttagaatttgcctctgtacttttgttctgtctcatttcttaatttatttggcagatttcctagaattgtgtgctctttgacctcattgaactcgttttgcagacttgtgataatctctgagggtacagtgtttagtatgatgtcgttcctgctcttgagagggtctagtggggaatgcaaaatcaacaggcagttaacaatatcacaaataatggacaaacggaaggagcactgccctagagttgtttattggttagggaaaagatctaggaaggcttttctggagaagtgatatctcagctgagacccaaaagattgttaatggagtcattgtgtcagtaggctacttagaatctggaatagatgaactcttcttaaaaatgattaacgctatgttttgtagctctttaagaagtagtaaccacactttaatctggaacacctgtgaactattgaaggatgttatcatgcaagattttcctgctgagattttccttcaaaggccaaaaattgttcaggtcagtgccctctataattgttttagattttgaactagagaactttttgcaataaagcaaattttgcagagtaggagttcttgggaaggaactttgtactcatgtttttaaaaagtgaagtatttggctatttaaagcacttattcgctaacttgggtggatagttatagttcttccaatagtagtagtttcatttgacacttgcagtccagtctggccaccttgagttaccatttatggatcacctaaatggtagagtagactttggacattgagattgtgcaggagcccttattaaaagtaagaatagcattgcttcttgagtatctcgtttatttaacgcacagtgctacatgctgggaaaatacagtagcggtgagtaacgcagatggattcttttctttttttctagtttattgcttgtatagtagagagagagggatccagggtggggaattgcaacatcttcacagcagccagtaatggctcagcattctcgctccacactcccagggctgaaatggactccagtgggtgccaactgttaatacctaggatcaaagctggcaaatgatcgcagaggaaagctgttaattactaaaatgtggttaaatggtttagatgcttgagatgaaaagggcttgctgtgatttttaaaatgttctctgtaatgtaatgtcctgagtggggaataatttctgtcttctctcagaatggttactcaactaacagattttagaaataggaaacactgactattctatttaaatgttgttgtcttattttattttgacccatctccttgctttatgccaagtcatatttgcccatttcagtttcttatgtcttacaaatatttggcaacttattttctcttgattattcacttaggcttacttacttaagctccacattctgctttgaagttgagctctttgttcccttagtaattttcacggctcttcttgatttcagagccttttatctctgttgaaactggcctttggagatggaaagcatcgcctggcattacagtcggtgtcctgcctgcagcagctgtgcatgtatttaagaaacagacttaactttcaccgagatccaggttttttctccaataaacacggtatttatttttatctgttcattagccactggtgttatttgtagattcttctgggaaccttccattatagttactgttagggtttattgtgtacgcattttcacaacataaactccccactcctaaatgtattcaaatgattatctttacagattgcgtgaatgacagaaactgccatgatctcttgagcctttttttttttttctggataagagatatttacaaggtgtttttcttttttctcccaaacttgcagagattctatatagtgttgttgggatgtagtgactcggatatttggtatggctattcatgtaggactttggacaatttagcaagttacatatagtgttaatacattgttttgtttgaaaaatattgatttgaattttatgaagagtatttttatgcaacttgcaatgtagtcaagtgttgcagcaatgtgagacttcagagaaaaagtgccacctaatggccaaatagagtaccagcctggcttcgacaaaaccagtaccatttaggatttttgtgagcttaatgcaacctgcatcgaaagtcaaatattatagtcatttgtcatcatgtttcatagttaatccctatttcattgggagtttcactgatcctgtgctacttgaatatttatgctttaccttggttttattctagatcttagagggtatggcattgtacaaatgactggtaatagagaacgtctgggtaccccatacttcaacagaaaaagagttacaatgttgatttaaaaagttgatatctctgaagaattgttaatgtatttaataagtatgtatttattacctgttttatgcccctgatattctagcctctagggaagtataacactgaacaaacgaataagatccaagcccttatgagcttctattttaaaaggctgggcacaggtgataaacaatcaagtttgcttgagataaggagaagtacttgaaggaaataaaaagggtgatgtgacagaatgtggttgggtaaacatagcttcatttaggatagtcagggaaagtccctcagaaagcttctattttaaaaggctggggacaggtgataaacaatcaagtttgcttgagataaggagaagtacttgaaggaaataaaaagggtgatgtgacacaacgtggttgggtaaacatagcttcatttaggatagtcagagaaagtccctcagaggaggtgacctgaagggtgacaaggaatcgtcactcgaagagctgcaagaagagtgttccagggaaggccaggcctcaaggttagcactgagggtgatgtccttgagcaactgaaataaagcccatgagagtggactgcagtgagctgggcagaagaggagaatgaggtgacatcagagaggtagttaggggccagagtatattggggcttgcagatctttttaaagattttatattttctttgaagtgtagtgagaagctcttggagagttttttttccccctctctctgactgtaaatgcttttattacctaattctttttttaaattggggtaaaataggtataatataaaatatgccattataaacatttttaagtatacaatatagtgacattaataacattcacattgttgtgcagccatcaccactatctgtttctaaacctcttcattatctgaaacagaaactctaatcattaagcagtgattcctcatttttcctttccccaaagctggtaaactctaatttactttctgtctctgattttgtctattctaggtacctcatctaagaggaatcatacagtatttgtccttttgtgtctggtttatttgtaatgttttcaagcttcatccacattgtagcttgtatcagaacttcattcctttatatggctgaataatattcctttgcatgtatatcccacattttattcatctatgcatttgtcgatggacatgtgggttgtacccacatttggcggttgtgaataatgcttcagtgaacattggcatgcaagtatctgtgcagtgcctggtttcaattcttttgggtaatacccagtgaataatagtgaaattgctgcgtcatatggaaattctatctttagctttttgaagaatcaccaaactattttccacagcagctgtaccatttacatttctatcagcaatatataaagcttccagtttttccacatcatcactgacttgttcatttttttcttttttaaaaataatcgtagtcatcctagtagatgtgaagtggtatctcatggttttgatttgcatttctctaaagacctaataattaatgaccaatgaatctctaataactttttatgtgcttattgtttgttcatgtatcttctttggagaaatgtttattaaagttctttgcccattttaaaaattggactggtttctttattgctgggttttaggttacttatatattctgaaaattaaacccttatcagatatatggtttgccaatatttcctcccactctataagttatcttaacactttcttgtaatgttcccttggtgtaccaaagttttagattttgatgaagtccagcttatctgtctgttccttggttgtttgtgctttcgatgtcatagttaacaatcgattgccaaattcaaggtcatgaagatttattttttccgctaagagctttatggctttagcttttatatttaggttgttgatccactttgaattaatttttatgtacagtatgaggtagccattcttggagagttttaagcagacgagtgcatgatctagtgtttttctgctttggtagtctctaatgttgtaactgaatgccattgactagaaggtcccatgtaatcaagtcagttagatataaacctaaatgtactaagtgaatacttatagaaaagtttgatctttgcttttgtttttacccctgtagaaggattcctactatcttaatttgttaatgtttttggaagaatgatacataaataccacatagtcagaagtctgtttctactaaagaataattttattttttctttgtttccccagacacagtttcccaaaattcttctttgtcttattgtcatgaagcaagaggtactcatcattcccagaatccttccccaggaagcagcagccctcggccttctgtggttgggcgcacaggccagcgacccagaggagatggccaggactgggatgcagcgtcctctaggtgactgctagcagtgtctctggggaaatgagaaatgccggttaacttgtgtgtgtgttaatttcagaaggagataattatttttctgtccttttttttttttttttttttgaaacattaacacaggtataggccttgtgttaaaccctggcttcatactttttttgaccatgatccacggtaaggacagataaatattacatcgcaactcagtgctcagtacttgaacatatgctctgtttatgtatatatatgtgtgtgtatgtgtcccccaaaa

SEQ ID NO: 13873 - DNA, 1132 bp, Homo sapiens
atggttcaatttcccgtccgttccgatgaaggaagaggttctgaacctgttaagcagattggttaagtatcccccagcagtccaacatttggttgacgttggtgcagtagagttcttatctaagcttcggtctaatgtggagccaaatctgcaggctgaaattgatggcattctggatggactttttcttcttccttcggaagttcctgcactatcttctgcctcataccaaaccaatcaaactgaattgtcaaaaaaccctgaaatcttaacaggatattttccccaagacaaaagtaatttccagcagatggaagtgccgccacgaccagtggtaaatcagactgtgaagtgcttgaagttttctacatttccttggctacccctgaccaccacagacagacatgtcctctcctctaatgaaagctctttaagaagtagtaaccacactttaatctggaacacctgtgaactattgaaggatgttatcatgcaagattttcctgctgagattttccttcaaaggccaaaaattgttcagagccttttatctctgttgaaactggcctttggagatggaaagcatcgcctggcattacagtcggtgtcctgcctgcagcagctgtgcatgtatttaagaaacagacttaactttcaccgagatccaggttttttctccaataaacacgacacagtttcccaaaattcttctttgtcttattgtcatgaagcaagaggtactcatcattcccagaatccttccccaggaagcagcagccctcggccttctgtggttgggcgcacaggccagcgacccagaggagatggccaggactgggatgcagcgtcctctaggtgactgctagcagtgtctctggggaaatgagaaatgccggttaacttgtgtgtgtgttaatttcagaaggagataattatttttctgtccttttttttttttttttttttgaaacattaacacaggtataggccttgtgttaaaccctggcttcatactttttttgaccatgatccacggtaaggacagataaatattacatcgcaactcagtgctcagtacttgaacatatgctctgtttatgtatatatatgtgtgtgtatgtgtcccccaaaa

SEQ ID NO: 13874 - DNA, 7830 bp, Homo sapiens
ctccggcggctgcagattgacgggacgagatggtcctggcagggctcatcaggaaactcggtcatcagctggccgagatcagggagcgcgctctcaagagtattctctgcaagattgagcacaacttaatctgctacgctgatctcattcaggagaggcaactttttcttcatttgctggaatggttcaatttcccgtccgttccgatgaaggaagaggttctgaacctgttaagcagattggttaagtatcccccagcagtccaacatttggttgacgttggtgcagtagagttcttatctaagcttcggtctaatgtggagccaaatctgcaggctgaaattgatggcattctggatggactttttcttcttccttcggaagttcctgcactatcttctgcctcataccaaaccaatcaaactgaattgtcaaaaaaccctgaaatcttaacaggatattttccccaagacaaaagtaatttccagcagatggaagtgccgccacgaccagtggtaaatcagactgtgaagtgcttgaagttttctacatttccttggctacccctgaccaccacagacagacatgtcctctcctctaatgaaagctctttaagaagtagtaaccacactttaatctggaacacctgtgaactattgaaggatgttatcatgcaagattttcctgctgagattttccttcaaaggccaaaaattgttcagagccttttatctctgttgaaactggcctttggagatggaaagcatcgcctggcattacagtcggtgtcctgcctgcagcagctgtgcatgtatttaagaaacagacttaactttcaccgagatccaggttttttctccaataaacacgacacagtttcccaaaattcttctttgtcttattgtcatgaagcaagaggtactcatcattcccagaatccttccccaggaagcagcagccctcggccttctgtggttgggcgcacaggccagcgacccagaggagatggccaggactgggatgcagcgtcctctagtggaagtagtagtcatgctcatgtaaactccaggatatccgttcattcacctttggatatgggacacatagatctgccagagctggaaactgaagacacattggaactacaattccagcagctcagtcttccccagttttgtgtctccattctggaatcagctgttcctctcttaagaacaggtagcagacaagtgataataagagttctggaattgcttacagaggatatgacacttattggtgaagcaatttcaacagatatctgggatgacagcagcctttttggtatagatatgaaggagaaactactcctggtgttgggagcccttggagaaaccatgtgctaccataaaagtagtatcagtttggagcagccagaggtgatgcttgtgcaccacagaatggcctttatcagcatttccctgtttgcagttcgactgctacaaacgcttctccctgttgaaaaggcaagcgagtttttatcagagcctatgtcaacagcattatttctcctttctttggacatgcctatttctttggaatatccaaatattcatgaagctgttgtggcctatttggaacagctgaattctgaaaactacagtatttataaacgaactgcagaggccgtttattcaattgaatgcacctgtaacttcctgtctgatattgggaaagagggagagaagaatctcttagaattagtggagctggcagaccaagccttgcgtagcttttcctatcatcagcatttcccgctaataaaggaaatcatcagcatttgttcaaagatctggaaatctgctcaggccagtccattactacaaggagaaagtcagaaggtgcttctccatatgttgtctcacccattgccacgagtgaaagctgaaacttaccactgctgtctggaaatcacgaaggaatgtttaggtgtccataatgtcactaaacccgtgtcttcactttgcaatggaattcattttctacttcatccaaaagttctgtatgaaatctctgtatttggcattcaagagcccgaaagtgaggtgaacactgctgccaaggccattctgttatacctgcttcagggacgattgatgatgacagcattgacctggaacaagtttattgaatctctctgtcctgtcatcccaatactacagggctatgccgacacagaagatcctctgggtaactgcattctccttctaagcaaagcaagttctgacacagaagagatgcttccgtgtactacccgattaaagtccatgctgcgacttttgctagtgaaaaagccatcggtccgttcgctagcattaaagcttttagcattccatcttaccagtgaagaaggggctgatacaaagcgtcctctaatagacgccagagttctctccagagttactgatttattcattgggaagaaacctattgaactcagactggatgacagaagagagctggttattaagttggagactgttgaaaaggtatatgaaatcttcacctcagatgatgttgatctcgttttgagaaagtcagctgctgaacagttagctgtgattatgcaagatattaaaatgcatgctgtggtgaaaaagttatgcttaattgacaaaataattgagtatttaaatgaatgtgtgagtcaagatggcaaggttgtagaatgtttggtacaaccatgcctcacactcttgaggaaggttttatgtggtgatccagtcatgcgtgtttcgctctcgcaacagtcttctcttttgaccgtgttattcagagtttccttaatatttcatgaagattgtagtgtcgtgactgaagttggagcactattttgtcttctattatttgatgaagtatcgagaatggatatgtggtctgttaatccttccaataaaccttctttgccatcggtcttcagtttgcctgtttccgtttttagaaggtaccatctacctgttcatgtaattggacaccatgctgtgagtccttactccatagttttgcccttatctgctgattgtttggccttgaagccggtgtcagatatgctgagaatagcttggaacctgtcatggtatcatgggagtgataatctgttgaagcaaatgaactctgaaactaaaacgcaagaaattttagatgcattgaagttatctacagaggacatcctcactctgaagataacacacatggctagtgggctgcaggactgcctccattccattgttcaggctgcaacccacagggaagttagggctgctgtcaccaggatgagtttttatcttctgaatgacagattgtctttaaagggttgccctggtccatgtggggttaccttgaagtccttggcttggcacaccgcactaaacaggtttttacaggtgcttcctgcttgcactgaagatgagaaactgctaatagatatcatacattttttaaataaattaataaaggaacaaagaaaaaattcttcactagaacttctaaactggattctcgaattacttcttagacatagtgcaaacccactgttagacctcttggttctgacagagtcacaggcacgagaagaaacagatgatatccggactgctgtcaggcaacaacttcagaaagaactgattgctctttttgataccttgctgctcaatttcatggaagttactgacaggaaatgctcggaacttctttacgtttttcaaacgcagctggctctgaaactgctccagtgtctgaaagtgacggatgcgcctcatttctatggcctgccgtcccttgagcggaccttacgagggatggctaacctcactgcgtttccgggatggagctcacactctcctctcacaaagcctctagatatctgtgtgaagtacttgtcaggtctccttgaggtcattacttctttttatgtggagcgtggaggaaatgctatgtccttcatgggaaaaggtgttacaaagagcacaattctttgcttgcttcacttatcccatgagatgatggcccaggctgggagcttggagtggatgtcactttggttcttgcctttgggtagtcatagtgaagaacatattcctactcaacaaggattggcttggttgattccattatgggttgatcgggacccagaggtgagattcacttcactgggattaggatcagcactgaccacccttgaaacgggctgtgtggccttagcaaacagttgtcagaacatttccggtgggctctggggaactgtggtgaacattcttctggaccagtcagaatgtagtatggtgcgccgggaggcggcatttattcttcagaatctccttgtaattccaatgcctacagaaattataaaggattatacttggcagggtccctgtgttcatgatgaggactctggcctatcgctcattggaaaacctgcccttcaggctcttttatatcactgccatttttatgaacatttgaatcagatggtaaagcattgttacctaggacggtgtatgtttgatttgaatttttctgcttttgatagaaattcagaaagcaatgatttaaatggtttagatgactcattcaagttttggagggctccatctaggacaagtcaggatcgagatccaagttctctctccacctcagaaacaacggtggcaccttcattggggagtactgaatttcagccacttgtgcagtcaacaacacttctacctgaagcctcccatgaccagtttgtggctcaaggtcaccaggaaagtacatcaccacggccacctcatgattcatctctttctgctcccctgcccaaactgtgtgtttttgttactccatctcttctttcagcaatgtgcagcctcttggacaacctcttgacgattgctcccagagacactgcaaaggcttttcgacaagctcatctcatagaacttctctgtagcattgcagatgctaccctcatacagacatgtgtccaggaactcagagccctgctgccttcatcacctccagctgaacacactcaggctcaggtttcctttctcctggaatacctatcctctttgtccaggcttctgcagtcatgtttattggtggagcctgaccttgtgattcaggatgagcttgtgaaacctcttatcaccaatatcattggaattctcaccatatgtaccaaagatgtattagataaagagttaatatcagctttttatcacacatggacacatttatttaatcttctggccatgctcctgaggaaagctggtgccatcacactcccgtttgttaccgtggccctggccaagcactggacagcggcgattgatatgttctgcacatgtgcaggcttgtctgccacgtgtcctgccctgtatactgccagcttgcaattcctttctgttctcttgaccgaagaagcaaaagggcatctccaggctaagagcaaaacacatttatgctgtagtccaacagtggcttcacttcttgatgactctcaggaaaatcagaaatctctagaacaacttagtgatgtaatccttcagtgctatgaagggaaatcctccaaagatatcctgaaaagagtagctgcaaatgcattgatgtcactgctggctgtcagtagaagagcacagaaacatgctttgaaagccaatcttatagacaattgcatggagcagatgaaacacataaatgcacaactgaacctagattctctgaggcctgggaaagcagcattgaaaaaaaaggaggatggtgttattaaagagttaagcattgccatgcagctcctaagaaactgtctttatcaaaatgaggaatgtaaagaagcagctcttgaagctcaccttgtccctgtcttgcactctctctggccttggattttgatggatgattcattgatgcaaatttctctgcagctcctttgtgtctatactgcaaattttccaaatggttgcagttctctttgttggtcaagttgtggacaacaccctgttcaagctacacatagaggagccgtgagcaactctctgatgctgtgtatcctaaagttggcttcccagatgccactggagaacaccacggttcagcagatggtttttatgcttctttcaaacctggccttgtcgcatgactgtaaaggagtaattcagaagagtaacttcttacagaacttcctctctctagcattgccaaaaggaggaaataaacatctaagtaatctgactattctttggttgaagttactcctgaatatatcatctggagaagatgggcaacaaatgattctgaggcttgatggctgtctagacttactaacagagatgagcaaatacaagcacaagagcagccctttattgcctcttcttatctttcataatgtttgcttcagtcctgcaaataaacccaagatcctggctaatgaaaaagtcattactgtgcttgctgcctgtctggaaagtgagaatcaaaatgctcagaggattggagcagctgccctttgggctctgatttacaattatcagaaggcaaaaacagctttgaaaagcccatcagtaaaaagaagagtggatgaagcatactccttagcaaagaaaactttcccaaactcagaagcaaaccctctaaatgcctattatttgaaatgtcttgaaaacctcgtgcagctccttaattcttcctgagtgccatgggatgctacaccttgaagctgacagtcatcaacaggggagctaaagttgaagccagctgtgtgtagcagctgttacctgaagacgtgctacctctctacaaagtgttgatccccttctttcccatgagagagagaactggtgatactccaacaccgtccagttgtggcagctctccagaagtaatagcagctgacaactttctgtgccttttcctttctgttgaaaaggcatagaaagttctgggaacataaacatttttacccttttctatgccatttattttgtaaaaatcctatttaacagttatttaataaaacaatatttttagaaactaaaaattgactaataattgctgcttacagacttttatcagtctcatgaatattaattttaggagttgaaataagacactgtgtcctggttgtttctctctttttttaaattttaactgatgtaaaatttggctctgtcagtgcaaatccttattttcaaaactttctgttatccagagcatccacactggaaaagggctatgtagaagtaagtgtgcattatttgtaaagggctgtgtggaagtaaatgtacatgatttgtaagtagctttcttaggcaagttttagtgatgttatcttcttcctagatgactcttaaatcattacatgtataatcttcaccgttgtcttctgcaaggctgtgtaataaagaagaaagaaatagagttggggctgtataagcctgggttcaaatttagctcagcccaaaacatcatgaagaatagagtaagactgaaaaatgcagaagatggccgggcttggtggctcatgcttatactttcagctctttgggagaccgaggtaggtggatcacttgaggccaggagtttgagaccagcttgggcaacttggtgaaatcccatctctcctaaaaatacaaaaattagccattcctggtcttgagcgtctataatctcagctactccagtggctgaggcacgagaatctcttcaacctgggaggcagggaggttgcagtgagctgagatcatgccactgcattccagcgtgggtgacaaagcaagactctgtctcaaaaaaaaaaaaaaaaaaaaaaaa

SEQ ID NO: 13875 - DNA, 2065 bp, Homo sapiens
tattcagagtttccttaatatttcatgaagattgtagtgtcgtgactgaagttggagcactattttgtcttctattatttgatgaagtatcgagaatggatatgtggtctgttaatccttccaataaaccttctttgccatcggtcttcagtttgcctgtttccgtttttagaaggtaccatctacctgttcatgtaattggacaccatgctgtgagtccttactccatagttttgcccttatctgctgattgtttggccttgaagccggtgtcagatatgctgagaatagcttggaacctgtcatggtatcatgggagtgataatctgttgaagcaaatgaactctgaaactaaaacgcaagaaattttagatgcattgaagttatctacagaggacatcctcactctgaagataacacacatggctagtgggctgcaggactgcctccattccattgttcaggctgcaacccacagggaagttagggctgctgtcaccaggatgagtttttatcttctgaatgacagattgtctttaaagggttgccctggtccatgtggggttaccttgaagtccttggcttggcacaccgcactaaacaggtttttacaggtgcttcctgcttgcactgaagatgagaaactgctaatagatatcatacattttttaaataaattaataaaggaacaaagaaaaaattcttcactagaacttctaaactggattctcgaattacttcttagacatagtgcaaacccactgttagacctcttggttctgacagagtcacaggcacgagaagaaacagatgatatccggactgctgtcaggcaacaacttcagaaagaactgattgctctttttgataccttgctgctcaatttcatggaagttactgacaggaaatgctcggaacttctttacgtttttcaaacgcagctggctctgaaactgctccagtgtctgaaagtgacggatgcgcctcatttctatggcctgccgtcccttgagcggaccttacgagggatggctaacctcactgcgtttccgggatggagctcacactctcctctcacaaagcctctagatatctgtgtgaagtacttgtcaggtctccttgaggtcattacttctttttatgtggagcgtggaggaaatgctatgtccttcatgggaaaaggtgttacaaagagcacaattctttgcttgcttcacttatcccatgagatgatggcccaggctgggagcttggagtggatgtcactttggttcttgcctttgggtagtcatagtgaagaacatattcctactcaacaaggattggcttggttgattccattatgggttgatcgggacccagaggtgagattcacttcactgggattaggatcagcactgaccacccttgaaacgggctgtgtggccttagcaaacagttgtcagaacatttccggtgggctctggggaactgtggtgaacattcttctggaccagtcagaatgtagtatggtgcgccgggaggcggcatttattcttcagaatctccttgtaattccaatgcctacagaaattataaaggattatacttggcagggtccctgtgttcatgatgaggactctggcctatcgctcattggaaaacctgcccttcaggctcttttatatcactgccatttttatgaacatttgaatcagatggtaaagcattgttacctaggacggtgtatgtttgatttgaatttttctgcttttgatagaaattcagaaagcaatgatttaaatggtttagatgactcattcaagttttggagggctccatctaggacaagtcaggatcgagatccaagttctctctccacctcagaaacaacggtggcaccttcattggggagtactgaatttcagccacttgtgcagtcaacaacacttctacctgaagcctcccatgaccagtttgtggctcaagggaatcgacactttggaacaaatatccaattttagagcttggacgaggaaagaacaagatgaacctggaacatcttgctgtgccagaaagtcaccag

SEQ ID NO: 13876 - DNA, 4233 bp, Homo sapiens
gccaatcctatgagaactcagcatcccagctcatctgagcagatcctggaagtgatttctgcagctcaggattttttttttaagctacattgaaaatataggtttattttttgttcaggtttttcttttatattttttttctgcacaaaggaggaggatttttcacttactcatatcgaggccagatttttaaagccagctaaggcagcatcagctgtgcgggatttaaagcctatagctcagctgaaaaaaaaggtggggggcagggaagggaagataaaaggagaggaagctgggagaagacaagcatcatcttattttgctatgtggtaggaactgtctataagatagtgtagaattgtttatcttgagcagtttgttcttaacctataaggtatttttccttttttttttttttaaacctcccccacccttttcctgaaagctttgtttcagagctttgtattgggtttttttggtgaggaggttgtatttatttttttggtgtgtgtgtgtgagtgtgtgtgtgtctgtgtgtgtgttgtggtcccagctgagtcatcatgtctgctctgacgcctccgaccgatatgccaacccccaccactgacaagatcacacaggctgccatggagaccatctacctttgcaaattccgagtgtccatggatggagaatggctctgcctgcgagagctggatgacatctcacttacacctgacccagagcctacccatgaagatcctaattatctcatggctaatgaacgcatgaacctcatgaacatggccaagctgagtatcaagggcttgattgaatcagctctgaacctggggaggactcttgactctgactatgcacctctccagcaattctttgtggtgatggagcactgtctgaaacatggcttgaaagctaaaaaaacttttctcggacaaaataaatccttctgggggcctctagaactggtagaaaagcttgttccagaagccgcagagataacagcaagtgttaaagatcttccaggacttaagacaccagtaggtagaggaagagcctggcttcgtttggcattaatgcaaaagaaactttcagaatatatgaaagctttgatcaataagaaagaacttctcagtgaattctacgaacccaatgccctcatgatggaagaagaaggagccataattgctggtctgttggtgggtctgaatgtcattgatgccaatttctgtatgaaaggagaagacttggactctcaggttggagttatagatttttcaatgtatctcaaggacgggaacagcagtaaaggtactgaaggagacggtcagattactgcaattctggaccagaagaactatgtagaagaactgaacagacatttgaatgctactgtaaacaaccttcaggcaaaagtagatgcattagaaaaatccaacactaaactgacagaggagcttgcagttgcaaacaacaggatcattaccttacaagaagaaatggaacgagttaaagaggaaagttcctacatactggaatccaatcggaagggtcccaagcaagacagaactgcagaagggcaagcactaagtgaagcaagaaagcatttaaaagaagagacacaattacgattggatgttgagaaagaactggagatgcagatcagcatgaggcaggagatggaattggctatgaagatgctggagaaggatgtctgtgagaagcaggatgccctggtatctcttcggcagcagctggatgacctcagagctctcaagcatgaacttgcctttaagctgcagagttcagacttaggagtaaaacagaaaagtgaactaaacagtcgcttggaagagaagactaatcagatggctgctaccattaaacaacttgaacaaagtgaaaaggatttggtgaaacaggcaaagaccttaaatagtgcagcaaataaactgatcccaaaacatcattaggcatttttaagttggtcacgtcgcaagtccgatatcacaacttaattgtaaaaggaagaaatctgaaagttactacatttaagctctgattctatataaaatgtcaccaaaaagttgactttgaatttgttggacttttaaaaaaccagttggaaatataggttgggtttttttcttattgttttctccccagggttagaaaaattggtataagttcctaattaaaagctgaataaactttgagaaattatttctgagttgaccaataaataaaaataccactttctttaaaaaagcctagggaattgaagctctgtacatatactaatgatgcctttacaacccagtccttgataataccagattctcggtgcattgttcatgtctgtatctgcaagcctgttctgccattgcagtgtgatgaacctagaggtaactaccatgtgaacttgaactcttctaaaatagttctgtgtctcttagaccatgaccccttttcacttttgttatataggtttaatccccaagccaaggatagtacttagtatttcactacacttctattctcagtaaccaagattgcttgcaactttttttgccttggtgacttttgaaaaaaaaagaaaagaaaaagcagcatccttatatttctttaaaatacatagaaataaagttagtaattaggtaacctatgataacataataatgtggacgcctggggaaaccctcctcatgtttgtcatcttctacctctgccgttttcctgcaattccgcttcctacttaggcagttcagagagaacaattctaataaaaacactcctctcctattaacaaaaaatgatgcagtacccatttttcgtatcctgcttttcttatattggagtaaaaaggacagggtatagacatgaatgatgatattctgcctggcctgtcatttcttacctggaaacatttacttaagagtttctgttactttttgttcagatggggatttgctaaaggttctgggaagctaataattgaattattagaaaaacatttcagaataggaagtaaatgataaacttatattctttattattatttagtacaaaaatagattcccagtagatatccacaagcaatattagcagggcttctgtttctaagtgaccacagactaaccctttctaggctttaacattgtaaataatcctataaacagtttgattttttaagatgatttttgatttgaagagacaggctttacataagccttcattccttcaaaaggtcctgacaaaatacttgggtttttttctctttttttcattctggtatgctttgcagcatttcagctgctttggtggggacacagataaccccttcgcttccagctcttaaaattctttatctttttcttggcaaaaccagaattaagagtgtaagatagattccatgtgtgcttatataggtccctgcacagattggacttgaaccaaaattaagtccaaagaacatatgtttagaccaacttcatggaagtggaagatcctgtgctcttgaacttattttaattcttataatttgcacctatataaacaaagctcctactgtattcttctcttcatcaaccttttgtggtgatgggttgccttttctacgagcatttggaaggagtgatcaaataccgaaattgaactttctaaaacctacacatagcatgcgtttaaattctattatataaagccccaagtgctttaccttctaaaacatgcttctctataggtgcaaagttataagatatgtagaagaaaacatccatcagaatcttctggagaatatggtcagagtcttaaacaggcccagtgctgagttctttgtccacttagtcacacatcttttgtgggaatgggaaaggaaggagacagccaaactctgacaaaggcttttccttatagaataacccaaagcctaggtgagggttgatatataatgtcccatgatttaatatatgtggtttgggggaaaggacaagaaaaaactataattccacatataagaaggtagttgcccatttacaagttccagttatgtgtgtaaaacagaaaaattaagtaccaaacctattaggaaatttttttaaaaagtggatttaacttaaattactgtgtacttgaggttggctttggatatggattttctaaaaagtgatgttttattgtttatcatctaatggctgtaaactgtagtactagaataaaaaaaatggaaaatca

SEQ ID NO: 13877 - DNA, 4433 bp, Homo sapiens
agttcattagtcagccattttggtcaacaccctgcttactgcgcacggccaatcctatgagaactcagcatcccagctcatctgagcagatcctggaagtgatttctgcagctcaggattttttttttaagctacattgaaaatataggtttattttttgttcaggtttttcttttatattttttttctgcacaaaggaggaggatttttcacttactcatatcgaggccagatttttaaagccagctaaggcagcatcagctgtgcgggatttaaagcctatagctcagctgaaaaaaaaggtggggggcagggaagggaagataaaaggagaggaagctgggagaagacaagcatcatcttattttgctatgtggtaggaactgtctataagatagtgtagaattgtttatcttgagcagtttgttcttaacctataaggtatttttccttttttttttttttaaacctcccccacccttttcctgaaagctttgtttcagagctttgtattgggtttttttggtgaggaggttgtatttatttttttggtgtgtgtgtgtgagtgtgtgtgtgtctgtgtgtgtgttgtggtcccagctgagtcatcatgtctgctctgacgcctccgaccgatatgccaacccccaccactgacaagatcacacaggctgccatggagaccatctacctttgcaaattccgagtgtccatggatggagaatggctctgcctgcgagagctggatgacatctcacttacacctgacccagagcctacccatgaagatcctaattatctcatggctaatgaacgcatgaacctcatgaacatggccaagctgagtatcaagggcttgattgaatcagctctgaacctggggaggactcttgactctgactatgcacctctccagcaattctttgtggtgatggagcactgtctgaaacatggcttgaaagctaaaaaaacttttctcggacaaaataaatccttctgggggcctctagaactggtagaaaagcttgttccagaagccgcagagataacagcaagtgttaaagatcttccaggacttaagacaccagtaggtagaggaagagcctggcttcgtttggcattaatgcaaaagaaactttcagaatatatgaaagctttgatcaataagaaagaacttctcagtgaattctacgaacccaatgccctcatgatggaagaagaaggagccataattgctggtctgttggtgggtctgaatgtcattgatgccaatttctgtatgaaaggagaagacttggactctcaggttggagttatagatttttcaatgtatctcaaggacgggaacagcagtaaaggtactgaaggagacggtcagattactgcaattctggaccagaagaactatgtagaagaactgaacagacatttgaatgctactgtaaacaaccttcaggcaaaagtagatgcattagaaaaatccaacactaaactgacagaggagcttgcagttgcaaacaacaggatcattaccttacaagaagaaatggaacgagttaaagaggaaagttcctacatactggaatccaatcggaagggtcccaagcaagacagaactgcagaagggcaagcactaagtgaagcaagaaagcatttaaaagaagagacacaattacgattggatgttgagaaagaactggagatgcagatcagcatgaggcaggagatggaattggctatgaagatgctggagaaggatgtctgtgagaagcaggatgccctggtatctcttcggcagcagctggatgacctcagagctctcaagcatgaacttgcctttaagctgcagagttcagacttaggagtaaaacagaaaagtgaactaaacagtcgcttggaagagaagactaatcagatggctgctaccattaaacaacttgaacaaagattgcgccaggctgagcgaagccgccaatctgctgagttggacaaccggctcttcaaacaggactttggagacaagatcaacagtctgcagctggaagtcgaggagctcaccaggcagcggaaccagcttgagttagaactaaaacaggaaaaagaaagaagattacaaaacgacaggagcatcccaggaaggggttcccagaagtcagaatccaagatggatgggaagcacaaaatgcaagaggaaaatgttaaactaaaaaagcccctggaagaaagccacaggctgcaaccccaccctatggatgaacaggatcagctgctgctctctgaaaagccacagttgtgtcagctatgccaggaagacggcagcctaacaaagaatgtgtgtaagaactgcagcggaaccttctgtgatgcctgttcaacaaatgaactgcctcttccttcaagtatcaagcttgagcgagtttgcaatccctgtcacaagcatctgatgaagcaatattctaccagcccatcataagactggaggccaagacctggaccaaaacgtttatgcaggctcctctgtacctgtgttttagctgtcaggatctcatagagcccagttcttagagtcaactaaagagttgataggaatttactaggtccagggagaaaaggcagtggttggggttactggaaattttgctcattttctctaatgactgtatgaataaaagtgaacttacttgagcctttctcttctaaatctaaacaacctgatattgaaggtttgctttatagcatatctttggaaaggcaactcatttttatgattagtgatactggggtggatttaataggagagagaatccaggcagataagaataaaaaggaaaatgatcatctccttctatagcatttgcagattcaagggggagaggtagatgctgagatcaaaatgacagttgttacttatttttccaggtgctgttagtataaacattgtttcctcttcacccctgctaactacctctttaaagtatttctaccaaactgtgaacccaatctcagggaaaagaaattaaaaagtaatataaattctgcatatattaaaaacaatattgtaatatgttataatttcaggaccagaattttctggtctttacctacaagggttttcattatcaaaaaaaagaacatttgtttttctactttatgacttcaaagtaaataactgcccttttcagaatctccttccacaaaacaagccaactcttccccattccctccatcttcctttccaagtcataatggaaattgtaaggagttttaaaaatagggtttggcttttgcaaatagaagatattgattaaagcaaagtcaaatatagagtaaaataagtttaatttgttttcttaagacagggtcttgctctgttgcacaagctggagggcagtagtgcaatcacagctcactgaatccctgttctcccgggcctcaagcaatcttcccaccttagcctcccaagtagctgggactggctttttttttttttttttggccggggagggggtctcattggttgctcagcctggtctcaaactcctgggcttaagcagtcctcccaccttgacttccacagtgccgagattacaggcatgagccaccacacctggccaagtttaatttgttcatggctgagaacagttagctcggaatacttacattgttttttgaataaggaattccttattctgagtgagtcacgaatgagagctgatagatgctttcttgaaaagggcaatacagtcatcccttggtatccatgggggattggttccaggaacccaacttgatatcagaatccatgggtgctcaagtcccattatagagaatgggttatatggtatttgcatataacctacatacatcctcctgtgtactttaaatcatctgaagatgattacttatacctaataaaatacctacacatcacttcatttgcatggattcaacatagtgcttggtgttcagtaaattcaagttttgcttttttggaactttgtggaatttttctttttctgaatatttttgattggcagttggttgaagccatggatgcagaacccatggatatggagggctgactgtacttacttacatatctatctatctttgagtaacaaactctttgggggaaaagagggaagtgtattgagcaagagaaggcaaaaaacattacataatattttgattctgttacgtgtgtctatagattgtttcattctaatcaagacctaagaaggtatgattctgtgactgatttagaattctggggtggaaatatcctggaaccatgttttttaataaattctgtctcttggaaagagttaacaacagcctgggaaagagttgttattccaaaagtcagcctgttacttggtgaagctgaagtttaagagttctggggaaaaataaaatctagtaattccagccta

SEQ ID NO: 13878 - DNA, 2143 bp, Homo sapiens
gtggccgagaagaaaggtggcggtggcggcggcggcgcagcggacgggacggggcggcggctcctcgccctgaccctctgctcccccgcccaggcccgggcgcgaatcggaggctgcggcgaaggaaggagtgagcatggctgagaccccgccgccgcccaccgctggtgccgaaagttgcagcgaggagccggcgaggggcggggagtggcggccggaggagccgcgccgcgctcccgccgggggcacggaccgagagggcgaggcggggccgccgccggcctcccccgccgggcagtcggagcccgactcgccggtggccgcccccttcttcctgctgtaccccggcgatggaggcgccggcttcggagtgcgcccgccgccgcagcagcagcgctcctggaggaccccgccgtcccccggctcaccgctgcccttcctgctgctgagctacccgagcggcggcggcggcagcagcggcagcggcaagcaccatcctaattatctcatggctaatgaacgcatgaacctcatgaacatggccaagctgagtatcaagggcttgattgaatcagctctgaacctggggaggactcttgactctgactatgcacctctccagcaattctttgtggtgatggagcactgtctgaaacatggcttgaaagctaaaaaaacttttctcggacaaaataaatccttctgggggcctctagaactggtagaaaagcttgttccagaagccgcagagataacagcaagtgttaaagatcttccaggacttaagacaccagtaggtagaggaagagcctggcttcgtttggcattaatgcaaaagaaactttcagaatatatgaaagctttgatcaataagaaagaacttctcagtgaattctacgaacccaatgccctcatgatggaagaagaaggagccataattgctggtctgttggtgggtctgaatgtcattgatgccaatttctgtatgaaaggagaagacttggactctcaggttggagttatagatttttcaatgtatctcaaggacgggaacagcagtaaaggtactgaaggagacggtcagattactgcaattctggaccagaagaactatgtagaagaactgaacagacatttgaatgctactgtaaacaaccttcaggcaaaagtagatgcattagaaaaatccaacactaaactgacagaggagcttgcagttgcaaacaacaggatcattaccttacaagaagaaatggaacgagttaaagaggaaagttcctacatactggaatccaatcggaagggtcccaagcaagacagaactgcagaagggcaagcactaagtgaagcaagaaagcatttaaaagaagagacacaattacgattggatgttgagaaagaactggagatgcagatcagcatgaggcaggagatggaattggctatgaagatgctggagaaggatgtctgtgagaagcaggatgccctggtatctcttcggcagcagctggatgacctcagagctctcaagcatgaacttgcctttaagctgcagagttcagacttaggagtaaaacagaaaagtgaactaaacagtcgcttggaagagaagactaatcagatggctgctaccattaaacaacttgaacaaaggtaaaagtcctgtttctttaatgaaacactttggattgtcagtgctgaagtgaaaagaatgtgctgtacattcggcaaatagaaaatacatgaaattcttccaaattagcatcagacattctggtagaaaaaagccagttgaatgttatgtgtgttttctaaggtatgactgaaatgtttttaggaaatgtcaatcacttgactagcctttaaaaaaaaaaaagaaaggtcagccttttatgactgttttgaacatcagaactcttaatccatgtcagagtcatgtgttagaggaaggatacttaaaagcatggaaggactcttaaatgtatgtatgtaattctgtgattttattgttcatcactgaagtctttgaatacttggatgctaggggatatagaggcactgagagataggtgtcctccaaggatctattctggatctttctctcccttctttaacccttttctcttatctcccttttctttct

SEQ ID NO: 13879 - DNA, 2342 bp, Homo sapiens
gattatgtgttcagaaggcagtctcagtgaacttctcaaagtgagaaggttgtagcttttaatacagtctcagaagcctatgggacaaagttttctggacacggttcatcccttcttgttgctctgccctgaaaataacctggctagtcaccctttcaagactcttgggaggatttgacagatttggtggagcaaatgcgcgatgatacagaagatcctaattatctcatggctaatgaacgcatgaacctcatgaacatggccaagctgagtatcaagggcttgattgaatcagctctgaacctggggaggactcttgactctgactatgcacctctccagcaattctttgtggtgatggagcactgtctgaaacatggcttgaaagctaaaaaaacttttctcggacaaaataaatccttctgggggcctctagaactggtagaaaagcttgttccagaagccgcagagataacagcaagtgttaaagatcttccaggacttaagacaccagtaggtagaggaagagcctggcttcgtttggcattaatgcaaaagaaactttcagaatatatgaaagctttgatcaataagaaagaacttctcagtgaattctacgaacccaatgccctcatgatggaagaagaaggagccataattgctggtctgttggtgggtctgaatgtcattgatgccaatttctgtatgaaaggagaagacttggactctcaggttggagttatagatttttcaatgtatctcaaggacgggaacagcagtaaaggtactgaaggagacggtcagattactgcaattctggaccagaagaactatgtagaagaactgaacagacatttgaatgctactgtaaacaaccttcaggcaaaagtagatgcattagaaaaatccaacactaaactgacagaggagcttgcagttgcaaacaacaggatcattaccttacaagaagaaatggaacgagttaaagaggaaagttcctacatactggaatccaatcggaagggtcccaagcaagacagaactgcagaagggcaagcactaagtgaagcaagaaagcatttaaaagaagagacacaattacgattggatgttgagaaagaactggagatgcagatcagcatgaggcaggagatggaattggctatgaagatgctggagaaggatgtctgtgagaagcaggatgccctggtatctcttcggcagcagctggatgacctcagagctctcaagcatgaacttgcctttaagctgcagagttcagacttaggagtaaaacagaaaagtgaactaaacagtcgcttggaagagaagactaatcagatggctgctaccattaaacaacttgaacaaagattgcgccaggctgagcgaagccgccaatctgctgagttggacaaccggctcttcaaacaggactttggagacaagatcaacagtctgcagctggaagtcgaggagctcaccaggcagcggaaccagcttgagttagaactaaaacaggaaaaagaaagaagattacaaaacgacaggagcatcccaggaaggggttcccagaagtcagaatccaagatggatgggaagcacaaaatgcaagaggaaaatgttaaactaaaaaagcccctggaagaaagccacaggctgcaaccccaccctatggatgaacaggatcagctgctgctctctgaaaagccacagttgtgtcagctatgccaggaagacggcagcctaacaaagaatgtgtgtaagaactgcagcggaaccttctgtgatgcctgttcaacaaatgaactgcctcttccttcaagtatcaagcttgagcgagtttgcaatccctgtcacaagcatctgatgaagcaatattctaccagcccatcataagactggaggccaagacctggaccaaaacgtttatgcaggctcctctgtacctgtgttttagctgtcaggatctcatagagcccagttcttagagtcaactaaagagttgataggaatttactaggtccagggagaaaaggcagtggttggggttactggaaattttgctcattttctctaatgactgtatgaataaaagtgaacttacttgagcctttctcttctaaatctaaacaacctgatattgaaggtttgctttatagcatatctttggaaaggcaactcatttttatgattagtgatactggggtggatttaataggagagagaatccaggcagataagaataaaaaggaaaatgatcatctccttctatagcatttgcagattcaagggggagaggtagatgctgagatcaaaatgacagttgttacttatttttc

SEQ ID NO: 13880 - DNA, 11895 bp, Homo sapiens
tgacagcaagcccttaaccattcgtaattactgcactttaagacaaggggttggcattctttagagaatatgtctgtatagaattccaatttttcatccttttcctctccaacttacctcaggaaccagcttgagttagaactaaaacaggaaaaagaaagaagattacaaaacgacaggagcatcccaggaaggggttcccagaagtcagaatccaagatggtaatatttgctattcccttgttcttttacttaatttcagtttaaattttagaggctaccttgatagtcctgtcagttttcctttacagatcacatacttagtggctgtgtcctcaagtatgtagatagcaaactagtaattatgtgaacaaatgaaagcttgattctgagtctgcctctaggatactttctccaacttgatttcatttggaaagggggattttaataatcacagtgaccctatttcccttttaataattttttaagtaagattattttggtgtcttaacaaaaatatatgtttcttggatttctgctaaataataattttaataaaatagtataataatccctctccaaccctgaattcccctttaacagaattttcctcaatgtggatttgcttctgtatacctttttcaaatcatgaggatttcattttgagtatccttaaggaacttctcgtgggaataattagggaattaggcttgaggaaaggaaggtaatacagaataaagagcaaaagtagaaatttctacataataatcttagaaggagacccctccagcacctccagtgatgaaggagctacaattgggtaagatcatctctggggcccaggaaataatgaaatcagaaaaacataaaataactttttctgtaaaagacagtgaaaaaattgccttctgtgtgtacatattatacaaggcgacttcaaaaagatcatgggaaatggaattaaaaggtaaagatatataaactttatttctcaacctaagttccatcaagttcaagagactttagtaagtgatgatactagtcatgtaggccatccctgaagaactgagggtcctaggaatttaatcatatcaatacaatcttttttacattattaactgaagaaaaattggtgcactttaatgatgttttaagattaggaaacaaaaagaaatcagaggcaccaaatcaggactgtaaagtggatgcctaatgatttcccatcataactctcacagaattgccattgtctgatgagaggaatgagttaggagcatatttctggtggaatagcactctctgttgaagctttcctgggcatttttgtgctaaaactttggctaactttctcaaaacattcatcacaagtattagccaggtgtggtggcacatgcctctagtctctagtcccagctacttgggaggctgaggcatgagaatcacttgaacctgggaggtagaggttgcagtgagccaagatcacaccactgcactccagcctgggtgacagagcaacactctgtccccaaaaataaaaaaaattaaaaacactctcacaataagcagatgttggcattctctggccttccagaaagtcaacaagcaaaatgccttcagcatccctaaaaactgttgccatgacctttgcttttgacccgtctgcttttgctttgattgcaccacttccacctcttcatagccattgctttgattgtgctttgtcttcaggattgtactatgaagttgttacatctcctgttacaatttctcaaacaaatgcttcaggttcttgatcccacttgtttataatttccattgaaagctatacttttgtctgcagctgatacgggcacaacagttttggcacccatcaagtagaaagtttactcaactttaatttttcaaccagaattgtataagcctaaccaattgagatatctgtggtgttggctattgtttctactgttaattgttggtcctcttcaattagagcatgaacaagatcctcacaaattgatgtggatagtctgctactgcaggcttcatcttcaacatcatctggccccttcttaaagtgagttatccttttgtaaactgcccacttctttggggacaatcctaaagcattgtccccaaaagctttttgtaaagcatcaataatttcacaattcttccatccatgcttcaccaccaatttgatgtttgttcttgcttcaattttagcagaattcatattactctgataggggctcttttttcttttcttttcttttcttttttttttttttgaaacagagtctcattctcacctagaactgagtacagtggcacaatcatgcctcactgcagcctcgatttcccaggctcaggtgatcctcctgcctcagcctcctgagtagctgggactgtaggcacacaccacaaaactcagctaatttttgtatttttttggtagagtcagggttttgccatgttgtccaggctggtcttcaactcctgggctcaagcgatatgcctgcctcagcctcccaaagtgctaggatgacaggcatgagccaccgtgcccagcccggggttcttttcaaactgatgtcttatcctttttagtgactcaaaccaaatcctgattagatatattaaaataagttaatacaagtttattttggtgcgaaatatttttgaagtccatgcacagtcttttcgtaatacgcgttttccatgaactttttgaatacctctagtatataacaaagcaggaagagttcataaactatttaaaatttctagagagtgagctgctaatttactggcaaatagaaaacaatggtatgtggaaatttattaaatagtaccactactaataatttaaagtgtacaaagaaccactctaggccaggcacggtggctcacacctgtaatcccagcactttgggaggccaaggtgggcagatcatgaggtcaagagttcaagaccagcctggacaacatggtgaaaccctgtctctactaaaaatacaaaaataagccgggcatggtggtagtctcctataatcccagctactcgggaggctgaggcaggagaattggttgaacccgggaggcggaggttgcagtgagccaagactgagccactgcactccagcctgggtgacagatcaagactccatctcaaaaaaataaaaaaataataaaaaaaaacactctgtgtagcatgctatctttattattttagtttagtgaacataaaatctaaaaggcttacaaaagtttacttaaaatcttggcctacctcaccctatttttccaatgaggttttaagtttttcagtcttcagttgttgcctgcagtggcatttccaggaggataagtattgacctctcttccttgattcttgagtggtgtaagaacacacatctcagctgggtggctcacacctgtaatcctaacactttgggaggccgttggcatgaagattgcttgatcccaggagtaagagactagcctgggcaacataggaagacctcatctctacaaaaaaatttaaaaattatctcggtgtggtggctcgtgcctatagtcccagctgctcaggaggctgaggtaggaggatcacttgagcccaggaggttgaggctgcagtgagctgtgatcatgccactgcactccagcctgggcaatagcatgagaccttgtctcaaaaaacaaacaaaaagaaaacacattccacttttggatgcacatgggcagcagtcgaaggcgggcagcagtcgaaggcaagcagcagtggttgtgtgtgcctcagaaaaaaatgtagcccttagaactgcccagcaccttgccaggcacagtggctcatgcctgaactttgtgaggccaaggcgggtggattgcctgagcccaggagtttgagacaagcctgggcaacatggtgaaaccccatctctactaaaatacaaaaaagtatctgggccttgctgcgtgcacctataatcccagctactcctgatgctgaggccagagaatcgcttgaaaccaggaggcagaggttgcatgaaaccaggaggcagaggttgcagcgagccaagatcgtaccacagcactccagcctgggtgccagagtgagagtctgtctccaaaacaaacaaacaaaatttgcccaggcagggcttaagagtattggtagaaatgcagtttgaggctgggcgtggtggcttacgcctgtaatcccagcactttgggaggccaaggtgggcagactacctgggtcgggagttcaagaccatcctggccaacatggtgaaaccctgtctctactaaaatacaaaaattagccatcaatggtgggcgcctgtaatcccagctactcaggggctgaggcaggagactcgcttgaaaccaggaggcagaggctgcagtgagccgagatcatgccactgcactccagcctgggcgacagagcaagactccgtctcaaaaaaaaaaaaaaaaagagaaaagaaaaaagaaatgcagtttgaaactttacatctgtcctgccaagtagaaaattccttgagttgaacaggctatagagatggtggcactgggccgggtgcgatggctcacgcctgtactcccagcactttgggaggccgagacgggtggataatttgaggtcaggacttcgagaccagcctggccaacgtggtgaaaccccatctctactaaaaatacaaaaattagctgggcatggtggcgtgtgcctgtaatcccagctactctggaggctgaggcacaagaatcacttgaatccaagtggatcacttaaggtgaagagttcgagaccagcctggccaacatggtgaaacctcgtctctagtaaaaatacaaaaataagccaggcacggtgatgcacgcctataatcccagctactcaggaggctgagacacaagaatcgcttgaacccgggaggcagaggctgcagtgagacgagatggcaccagtgcactccagcctgggcgacagagcgagactctgtctccaaaaagaaagaaaaatattgtggcactggggcatcaacttgattgaacgtccagaggattatagtctgctgtatatggccatccttggttttaccagtttttcagagctcagtctggggaaaagaaaaaaaaaattatacttcccctaagaagtaactgatatctggagccaactttgcaagtaagtagaatacattctgaattttatttgaatctcaagaattaaaatattactttgaaaatcatttgtcacaaactgtcagaataattaagaaactacttagagcaaagaatgaggaaacatagcttgaaagttagatcccttccctaataaaaaaagctacttagctttatacccaaactaaggcattgcagaagaaaatatttgcaatatcattatttagcattctgaataattaataaattgggctgttttcttttggcaggatgggaagcacaaaatgcaagaggaaaatgttaaactaaaaaagcccctggaagaaagccacaggtgtttgttaatcaagtattaactaagatgtaaagttattctggggtggtgggaaggagggagttctttatatacattggcattgacaccgaccagacactgacttataatattaatatgccaggaagacatttgaagtggaagttaataataaaacgtataacatgtattaaaccaaacccattaggccatttcagaggaaagaaggatgatcaggctgtcctctcttccctgattaattcccaagctcagattatcacttaagaggttatttcccacctttactgaattggtatcccaggaaaataaagtataagtcatacatagcatttcttaacttcttaaatatatttgagtatgacttgtttctacctctgtgctaaatttcaaataagtggctgggcgcagtggctcacgcctgtaatcccagtactttgggaggccgaggcaggtggatcacctgagattagaagttcgagaccagcctgccaacatggtgaaacccggtctctactaacgatacaaaattagtcgggtctggtggtacctgcctgtaatcccaactacttgggaggccgaggcaggagaatcacttgaactcaggaggcagaggttgcagtgagccaagatagcgccactgcactccagcctgggcaatacagtgagactctgtctcaaataaaaaaaaaagttcaaataagtactctgatttctcttatgtctcatctctcatttttcctttatcttgagaatctcaaacagcttaacttcattcctttatcctaactctgtctgatttgctcatgatgaagagcataggatagtttcaaggaagctgactttttatagttattttagcaggttagaaatataattaaatattacatagtgccactgcattaaaaagtgaaggaggtccagttacatgacattctggaaaagacaaaactatggagacaaaaaaaaaaaaaaaaaatcagtggttgccagtggtaagagaaggaaggaacgaaccggtggagcacagaggatttttagggcagtggactactctgtatgatactatgatggtggatacatgtcattatacatttgaccacactatagactagacaccaccaagagtgaaccttaatgtaaactatagactctgggtgatgatgttgtgtcagtgtaggctcatcagttgtaacaaatgtaccactctggtgcagcatgttgacaaagaggccagggatggggcaggaagcatgtgggaagtctctgtactttctactcaatttgactgtgaacctaactgctctaaacataaaggtctactttaaaaggtggaggaagaggttagtgatgaggaatgataccacagtgaggttttgagagaactatacagctgtccctagccaggcttcgtcaccttaagaatgaggtagtgtgtcatctggagcaaaagtagctgctggagaagagaaaacacacagtccaatagtaagctaattatgcaggtgcttggcctaaatgtccctttctggccttgctcccaaagagcatggtttgatccagagctaactttaaactatcacccatctcacattacagaatggcataagcaaagagaagggaactagaagggccataaaattaacctgggcttccaggtgcctttcagggtcagcctcgttccaaactaaaatcaaatcatttacttgagcaaccaggagtgtcttaaatgccaacttctgatttaggtcctgagaatatggaacagtgcttccttatatctgaattgtgctctgcaacttagaatttgtttcacatttattatctccttatgattcagtattccttacaaaagtacctaatgcaactttacagatgagaaaactgagaagcagagaggctgggtgacttatccaagttgcctctgtttatcatgtctactgtttttaagtcctttggctctgcactacctattagcaacttccaggacttattctggccatagctgcaatcgttagacataccaggcttcctgggattatgatggcaaggaacatcggaaaacctggtcaccccatggtgtatgtctggtggtcacactgctactcaagtgaaaagaataagaaccattgcaatctgtagtgcattttccctgtaaccgagagcgggctttgcttcacctctcatttaggctctagtccatgctggaacatcggagttagctcagcttagtccctcatgaagaaatatttcaacctgaatgggttttctggtgacagtctcattcatttccccttcttgggttaatttgctaaagctcacatcttaagaatatttgggactgatacacaacatgtgataatggataatggatagatttccataatatcaaatagaaaaaaagctactaaaatatatggccagtgaaccattggagttttacacattgggaaacataaatgctaactattttgatagcaaaaaggaatgtaaaatataacttcaaatctatttttaaatgggaacccttatataataagtcaagggtcagattctagtgattcattttaagaagcaaagtttcctctccttggaggtcaaaattaataattatgttgttctaagtaatataaaagacctacagtatttcttgtttgaaaaaaatgtttgtattctgagctttttattgaaatgatataaatgaaaatacatgaagttcctatttgtcacaattttttacttctccattgtaggctgcaaccccaccctatggatgaacaggtaacagagcctcctgtttcaaaacatcttgtatgaattatgaagttggttgtaccgtgcctagccagcaaataaggtagcatgggcggaagatgagtgaatacagtgtgccatccttctaacaataccctgaacaaatatgtattgcctgaagctcacacaggaagtagcacagctttgagcagtttactaagtaaacatcagttctcacctattttaaattatccctgacataagatctaggagagctcactttatgtccctttcctctagtttttccttacataaaatggagagaaaaaagatgttttgatcacttagaaataagctaacataaatgattgtaaaacactttgttaatctaatagtatatgataagcccatgagaaagacagtgaatgctactgtgtctgagtcaccctgtcatttacctcttaggttataaaataaaataagtcctactgctttcctttttttttttttaaatggagataaggtcttactcacattgcccaagctggggtgcagtggacgatctcagctcactgaagcctcaacttcccgagcttaggcagtcctcccacttctgcctcccgagtagctagggctgcagagattaggtttcaccgtgttgcccaggctggtctcaaactcctgggctcaagtgatcttcccgccttggcctcccaaagtgctgggattacaggtgtgagcttccatgccctatgcttgccattctttttttccttttttttttgagacagagtctcactctgtcacccagggtggagtgttgtggcacaatctcagctcactgcaacctccgcctcccaggttcaagtgattcccctgcctcagcctcccgagtagctgggattacaggcgcccaccaccatgtccaactttttttttttttaatatatatatttttggtagagatggagttttgccatgttggccaggctggtcttgaactcctgacctcaagtgatctacctgccttggcctcccaaagtgctggcattacaggcgtgagccaccaggcccagtccccagtgctttccattcttgatggtagagtgaacaagaggaatgggatagtgttaaaactttttactctatacttgcatgtgtttgaattttctttttagaaatcatgttattataaaaattaagagctggaagcataatgataggattatccgagttgtattatggtggtaggactacctatttataattggtttagtttccagatagtctatagtgtgattatattaatattgtaggtaaaaaatgcatattctgaaagtactaatatttctggcactaagaaaaactaaccagctccctgtgtggtttaggatcagctgctgctctctgaaaagccacagttgtgtcagctatgccaggaagacggcagcctaacaaaggtaactgtgatgagaaacggacaggcttttcatagggatgtctacagcagcccccagtccctccccaggagtaacagggactttcccgcatagagtgcagagtgcatgcagagtgctgggagtggggtgaaaagcaaaaggggcaagcatttactgggtacctgttttttcagtcataataattcatgtcagaaaattcccattaaaataaacataaatagccaggcgcggtgactcacgcctgtaatcccagcattttgggaggccgaggcgggccgatcacaaggtcaggagttcaagaccagcctgatcaacatggtaaaaccccgtctgtactaaaaatacaaaaaaaaaaaaaaaaaaaaatagccgggcgtggtggcctgtaatcccagctactcaggttgctgaggcaggagaatcgcttgaacccgggaggcggaggttgcagtgagccaagatcacaccattgcactccagcctgggcaacagagcgagactctgtctaaaaataagtaaataaataaacaaacaaaaataattatgtaataaagcaaataagcagatagaaatgtataagtaaatattgagtgcctgctgtgtagaatgtgctggagaaagagtaatgaacaaagtagaccaagtctctgttcttgtcaagcttatgtccttcatagctgtcattttatagatgaagaacgttgaacatctaatgctaactacatttcccaaaattaagtcataagtgatgaagcccagcttccaacctagctttcgctccaaagtccacagtcctttcagcactttatcctgctcagaacaggatatgagctctccctgctagaccacttgttttccacccgatcctcaagggtgcctgcctgagcatcttcccagtttgttatcctagagtaggcagagttaaggaagtattcagaaagaatgagtgcccttgatagctggaactgtgtcttgttcacagaatcccccagcatctaatatggtacccaatccatagtagatcctcaagaaaagttatgtacaaatgagtgtatgaaacacatgcttggaagagatacaggaaacaggctcaaattctggatcacaacctgcatagcaccatctgtgatcatgcaaaattttaataaattataatatgacctagtcttaaattcacagaatcagataacaaatgaactgcccttatagaactggaagttacaattatagaaatatgttacaaagtagaacaaactgttaattctggctttcctcttctaagccatgcaatattagcttctgtatgtcagacaaaaattcttcttaggctttcagataaaagcaaccccctactcctctcaacctcaggaagatgaattatttgggatgaaggtagcacttcatgggagaaattattctttacagctttttatataggacccttggagctttgtgtataccaccctatcacagccttactgctgacattgctatagtgacttcttgctctctgtgcttgaccattaaagatgcaaaacatttaggaaaacaaaataatttccctatgaacaagatgcaggaagctgtgctcctgctgcattgataacccagtggatgtgcttacagagcaccagagaccacaggaaagcataaagcacatcagtgtatttattaggaattatactttcagttcatactctggacatttttaaatcttagcctgttcactcaatccattgctctttcactgccttatttggagtatgcgcaggtacttgcaaactaattttaaaactaacctacctcaaagtgagtatggggaacagatgtgtgaaggatattctaaagataagtgacttgtatgttacctgtttttatttttaactctatggcactgcttcttttcatttaaatctaaaaactagacggtgaacttttttgtagattgggcctgtgttcagatactacctggcacatagtaaacattcagtcattgtttgattaggcattgagcatttgccatatttggctttttatatcccatgaatccttatgccttgctcatcttctattccccgcctaacctcctcttctcatagaatgtgtgtaagaactgcagcggaaccttctgtgatgcctgttcaacaaatg

SEQ ID NO: 13881 - DNA, 436 bp, Homo sapiens
tgacagcaagcccttaaccattcgtaattactgcactttaagacaaggggttggcattctttagagaatatgtctgtatagaattccaatttttcatccttttcctctccaacttacctcaggaaccagcttgagttagaactaaaacaggaaaaagaaagaagattacaaaacgacaggagcatcccaggaaggggttcccagaagtcagaatccaagatggatgggaagcacaaaatgcaagaggaaaatgttaaactaaaaaagcccctggaagaaagccacaggctgcaaccccaccctatggatgaacaggatcagctgctgctctctgaaaagccacagttgtgtcagctatgccaggaagacggcagcctaacaaagaatgtgtgtaagaactgcagcggaaccttctgtgatgcctgttcaacaaatg

SEQ ID NO: 13882 - DNA, 531 bp, Homo sapiens
gtgccttcgtgctaccgataaagttggcggttacacgacaaaacgccgccagatcctaattatctcatggctaatgaacgcatgaacctcatgaacatggccaagctgagtatcaagggcttgattgaatcagctctgaacctggggaggactcttgactctgactatgcacctctccagcaattctttgtggtgatggagcactgtctgaaacatggcttgaaagctaaaaaaacttttctcggacaaaataaatccttctgggggcctctagaactggtagaaaagcttgttccagaagccgcagagataacagcaagtgttaaagatcttccaggacttaagacaccagtaggtagaggaagagcctggcttcgtttggcattaatgcaaaagaaactttcagaatatatgaaagctttgatcaataagaaagaacttctcagtgaattctacgaacccaatgccctcatgatggaagaagaaggagccataattgctggtctgttggtgggtctgaatgtcattgat

SEQ ID NO: 13883 - DNA, 15317 bp, Homo sapiens
cacaattacgattggtaaactatgcttaatttctaatagttcaggaatatattaaaaggtaactgcccacttagaggttttatcatacagaccaagattaggaatatcagtagtgttctgaaaaattctagatcctataaaatggttcatctctttttaacccacattccttatcatactttctcaatctttttctgagtattctcaacaagattttgttaatctttatttttttgcttttatagtttgtattacaagaatattaagtatacagaacctacttttttaaactatgccgtctcactcctacctaagtcctcatccctgcaaagattcttggaggtggtggctcctcttttctttacaaagaatcattaatgtaggattactctattttatttttagctgttatttctgatttattattggtcttagatataaatggaaaatttatcatccagtattagtcttaagatttttttagaaattaaaaaaaatacatatcaatatatagatagagagtatatcatctcactctaatcagaatggcaactatcaaaaaattgaaggataagtgttgacaaggatgtagagaaagagaacctttacacactgctggtgaaaatataaattagtatagccactatggaaaacatagttgtcttaaaaaattaaaaatcgggccaggcacagtggctcacacctgtaatcccagcactttgggaggctgaggcggatggatcacgtaaggtcgggagttcgagaccagcatgaccagcatggtgaaaccccatctctactaaaaatacaaaaaaaaaaaaatcagccgggcatggtggcatgcacctgtaatcccagctacttgggaggctgaccaggagaattgcttgaacctgggaagcggaggctgcagtgagccaagattgtatcactgcactccatcctaggcaacagagccagactccgtctcaaaaaataaaaaataaattaattaaaaatcagtctagcaaaagatccagcaatcccactactggggatatatccaaaggaaatgaaatcagtatgtcagagagaatctgtactcctatgtttattgcagcactattcacagtagccaagatagggaatcaacctaagtgttcatcaacacttgaatggataaagaaagcatggtatatatacacaatgggatgctattcagcgataaaaaggaatgaaatcctgtcatttgtggcaacatgggtgaacctggaggacattatgtgaagtgtagtaagccaaacacagaaagagaaatgccatatgataacactcatacgtggaatctaaaacgttgttctcataaaagtagagagtaaggtggggttaccagagggagaggaggcaggggatagtaagagattggtcaacaggtacaaagctatagttagataggaggaataagttctggtcctctgttgcatagtgtggggtgactagagttaacaataatacacattttaatatagttagaagaaaggtttttttttttctttttttttattgatgcataatagatatacatagctctggggttcatatgataatttaatatactcatgtagtaaagaccaaatcagtgttcttggtatacccatcaccttaaatatttgtcttttctttatgctggaaaaaaaagaggcttttgaatgttctcatcacaaatgataaatgtttaagatgatagatacattcatttctctgatttggtcattacacaatttttatattatcaaaacatcatgttctataccataaattactatgtgtcagtcatactttttttaaaaagaatttataataagggatactattcctgtactagattttatccaggtgctagtgttattatattaataacccctggtattcacatactaactcttcctggagtttagatagtataacaaacacaaggacctccccagaatgtctttaagaataaggaggagcctgaaaataaggggtgacttaacttgtactaaaaaattattacaggccaagcgccatggctcacacctgtaattccagcactttgggaggatcgcttgagcttaggagtttgagcccagcctgggcaacatagggacaccctatctctacaaaaattacaaaattaaccatgcttgatagtacatgcctgtattcccagctacttgggaagctgaggagggagatcacctgagcccaaggaggttaaggctgcagtgagccaagatcacactgcactccagcctgggtgacaaagtgagaccctgtctcagaaaaaaaaaaaaaaaaaaaatatatatatatatatatatatatataaaaacaaattgacagtatataacataattttagatttatttatttgtttttttttttttttgagatggagtcttgctctgccacccaggctgaagtgcagtggtgtagtctcagctcactgcaacctccgcctcccaggttcaagagattctcctgcctcagcctcctgaatggctggaattacaggcgcctgccaccacacccagctaatttttgtattttagtagagatggggtttcaccatgttggccaggctggtctcaaactcctgaccttgtaattgtgatccgcctgcctcagactcccaaagtgctgggattacaggtgtgagccatcacacccggccagaatttcagattttttgaaaacaaagcgatattattttgacatccttaaaatagttagcatttgccttctatgtatttgtgaatgagatctcaaaatataatacttttcataagaaaggtcgcagaaataatatatgtcagcattttaagaaggggtatgattcgttttctataatgctaatcaagtaaaatgagaatctcagtgaagtggcacataataaaaatcttaaaatttttcatatccttttatcacagtaagacaaatgtttgttaagaaggaaagaaactaagaaagtatttgaggtcctaggtgagcccaaggcacaaggcagatgcagaagatcctcaggtctttgtatcttcgatcacccacataatgttgcagtaataatggttgaaacaaaaagaggtttcatgttaagtgaactaaaaattctgttagcggccgagtgtggtggctcacacctgtaatcccagcactttgggaggctgaggcgggcagatcacgaggtcaggaattcacaccagcctggtcaacatggtgaaaccccgtctctactaaacatacaaaaaattagccaggcatggtggcatgcacccgtagtcccagctactcaggaggctgaggcaggagaatcgcttgaacccgggaggtggaggttgcagtgagccaagactgagcccctgcactccagcctgagcgacagagcgagactctgtctcaaaaaaaaaaaaaaaatctgttcgcctcgtaaccatactagtcatcatcctcagtaattgcgatgttaccccagggacccagatggtcctctgggttccctgggctcttgaatatatcaacaacattcacatttaggaggactgcaactgcttcattttgtgctgactgctgtaaccctgtaggtatatttctataataagatatgaccatcagttgtcgtaatatctactgaagtgtctcaaatatgtatatattttagatgtattaaataacactatctttggcttagcaggtttttcagatttgtacattattgggcaaatgttattgtatatcctaattattattgttaattattaattaattattgttaatgtctctgaaaatgaatggtagcttaagctattttgccagaatattcagacctgagagttttggtgtactttttcctgtgaaatattatggtttgtacttagttgaaggaacagagtgtaagcaatttacttacctttgggggcaggatgttgagaaagaactggagatgcagatcagcatgaggcaggagatggaattggctatgaagatgctggagaaggatgtctgtgagaagcaggatgccctggtatctcttcggcagcagctggatgacctcagagctctcaagcatgaacttgcctttaagctgcaggtaggggaaatatgaggaatagactcactggctctctaaaatcctggggcttccctcctcccatctgatcctccagaatcacactttaattacaagaggaaagaatcacatctcattttgatgctagctgccagtaaactactttcagaatcagacaaccatgggatcctgtattgctgttctagaaaaccatggccacttttcacattatagtagaggatgagggtcttttttatcctatagggtaatttctactctgcagtctaccgtgccagctaagttatatattctattagcttttacactggaatgtgatacattgatgaactattactgtgatcacactgcatataacaatactaactttagataaattgcttttttttccatttcaggattaactgatattgaaatatatgaacatttctgttttcccacttaccattagattcaaaaggcatgtgtggttgtattttaggatttatgttatacaggttgtttatcgttattttccataacagagttcagacttaggagtaaaacagaaaagtgaactaaacagtcgcttggaagagaagactaatcagatggctgctaccattaaacaacttgaacaaaggtaaaagtcctgtttctttaatgaaacactttggattgtcagtgctgaagtgaaaagaatgtgctgtacattcggcaaatagaaaatacatgaaattcttccaaattagcatcagacattctggtagaaaaaagccagttgaatgttatgtgtgttttctaaggtatgactgaaatgtttttaggaaatgtcaatcacttgactagcctttaaaaaaaaaaaagaaaggtcagccttttatgactgttttgaacatcagaactcttaatccatgtcagagtcatgtgttagaggaaggatacttaaaagcatggaaggactcttaaatgtatgtatgtaattctgtgattttattgttcatcactgaagtctttgaatacttggatgctaggggatatagaggcactgagagataggtgtcctccaaggatctattctggatctttctctcccttctttaacccttttctcttatctcccttttctttctcctgggtagttctgtagcttccactgtcacctccagtgtgttttcccagctcttaccttcatctggagaccagtcttgagttttcatcctttgggcagctatcttccaccagtatctacaattcagtctgcccaaagcacatcttcttcctatgctactctctttctgtgcttatgtgaaaccaccattttctctctggcaacttagcagccaagagaaatggctgagtcttcaaggatgaatgtgacgtggtacccaaggtcatttgatgtttctacccttaacacctgtttgtcacccttcttgcacttgagcaaaactaaactgctggtccctgtacttcccatttttcccatttatttctttcccaatagttccaccaattagaaatgtcctaattcttcccactcccttattcgtcagatacatttttaagtttaggctcaaatgccacctccccagagtttcctctgatacctctttgcagctagaaatgatctgtctttctgggaactcccatagcttcatactcatatctatctatactgcttatggcacttctcactgtctactgtaccttttaactctttatatatgtctcctccgatgcgagtgtaagctccctgagattagttaacgaatcttttaagttcccgtattagatctgtcgcagtgccttgaatatacaagcattcattcagtagatatatgaatgaatggattaatgggtgatttcttatattcagatgattcttaaccagtaagggtcctgaacagcagtgcatattaatgttaactcaaaacttaatggcaaatttataaataaacctgaaacctcttacatagccaaatacaaatgtatcagtctacctaggaaagatggttaggtacttgctcataaacagttatatgtttatgatttaacaaaatgattttactgttcataaattgtgcttttgaaatgaaatgtatcaaatttcttttcaatgatgttttgacttggaatttaaagcaaacagaaagagaataatgacttatctctttgagtattaagctgacttattctcttgctatttttgtgtttcctgtttatccattttctcattctcctttcacttcattgtcatttttattttatttagtgaaaaggatttggtgaaacaggcaaagaccttaaatagtgcagcaaataaactgatcccaaaacatcattaggcatttttaagttggtcacgtcgcaagtccgatatcacaacttaattgtaaaaggaagaaatctgaaagttactacatttaagctctgattctatataaaatgtcaccaaaaagttgactttgaatttgttggacttttaaaaaaccagttggaaatataggttgggtttttttcttattgttttctccccagggttagaaaaattggtataagttcctaattaaaagctgaataaactttgagaaattatttctgagttgaccaataaataaaaataccactttctttaaaaaagcctagggaattgaagctctgtacatatactaatgatgcctttacaacccagtccttgataataccagattctcggtgcattgttcatgtctgtatctgcaagcctgttctgccattgcagtgtgatgaacctagaggtaactaccatgtgaacttgaactcttctaaaatagttctgtgtctcttagaccatgaccccttttcacttttgttatataggtttaatccccaagccaaggatagtacttagtatttcactacacttctattctcagtaaccaagattgcttgcaactttttttgccttggtgacttttgaaaaaaaaagaaaagaaaaagcagcatccttatatttctttaaaatacatagaaataaagttagtaattaggtaacctatgataacataataatgtggacgcctggggaaaccctcctcatgtttgtcatcttctacctctgccgttttcctgcaattccgcttcctacttaggcagttcagagagaacaattctaataaaaacactcctctcctattaacaaaaaatgatgcagtacccatttttcgtatcctgcttttcttatattggagtaaaaaggacagggtatagacatgaatgatgatattctgcctggcctgtcatttcttacctggaaacatttacttaagagtttctgttactttttgttcagatggggatttgctaaaggttctgggaagctaataattgaattattagaaaaacatttcagaataggaagtaaatgataaacttatattctttattattatttagtacaaaaatagattcccagtagatatccacaagcaatattagcagggcttctgtttctaagtgaccacagactaaccctttctaggctttaacattgtaaataatcctataaacagtttgattttttaagatgatttttgatttgaagagacaggctttacataagccttcattccttcaaaaggtcctgacaaaatacttgggtttttttctctttttttcattctggtatgctttgcagcatttcagctgctttggtggggacacagataaccccttcgcttccagctcttaaaattctttatctttttcttggcaaaaccagaattaagagtgtaagatagattccatgtgtgcttatataggtccctgcacagattggacttgaaccaaaattaagtccaaagaacatatgtttagaccaacttcatggaagtggaagatcctgtgctcttgaacttattttaattcttataatttgcacctatataaacaaagctcctactgtattcttctcttcatcaaccttttgtggtgatgggttgccttttctacgagcatttggaaggagtgatcaaataccgaaattgaactttctaaaacctacacatagcatgcgtttaaattctattatataaagccccaagtgctttaccttctaaaacatgcttctctataggtgcaaagttataagatatgtagaagaaaacatccatcagaatcttctggagaatatggtcagagtcttaaacaggcccagtgctgagttctttgtccacttagtcacacatcttttgtgggaatgggaaaggaaggagacagccaaactctgacaaaggcttttccttatagaataacccaaagcctaggtgagggttgatatataatgtcccatgatttaatatatgtggtttgggggaaaggacaagaaaaaactataattccacatataagaaggtagttgcccatttacaagttccagttatgtgtgtaaaacagaaaaattaagtaccaaacctattaggaaatttttttaaaaagtggatttaacttaaattactgtgtacttgaggttggctttggatatggattttctaaaaagtgatgttttattgtttatcatctaatggctgtaaactgtagtactagaataaaaaaaatggaaaatcagcttttcctctgcctggttcaccttcatcttacttttctttagaatttgtttcttctccatcttttcccccccataatttcttcacctgtgtcctgcaaagtttttttcctctctctgtctctctgtgcattcttccttgggttattttattttgtgttgtgaacttggtcttcttccccaccatggcttttgttttttatcacaagttcatgtggctcacatccagattgcgccaggctgagcgaagccgccaatctgctgagttggacaaccggctcttcaaacaggactttggagacaagatcaacagtctgcagctggaagtcgaggagctcaccaggcagcggtgaagagggggtagcttgagctgacagggtggtcatgggtaattcttagggtagacagcaagaaaaggggtctcatgacttccagccaggttggctctgtctttgcaatgtcctttctctggaattggaattcagaaagcttcacgtacttcaacattccccaaatccgatcaacatgctttgtgatcaaagaattaggaaattagagcccaagatcccagataaatagtaattattagccaaaataacactaataataatatgtaatatttcctgaattcttactgtgtgccagatactttaggcacttcacatgcaaactctcctaatatcttcatatcaaccctattagtgatattattgcctccactttcagattaaagtagagcttaaggctgggcgcagtggttcatgcctgtaatcccagcactttgggaggccaaggcaggtgtatcacctgaggtcaggagttccagaccagcctggccaagatggtgaaaccccatctctactaaaaatacaaaaatttgccagacatagtggtgggtgccagtaatcccagctactcgggaggctgaggcaggagaattgcttgaacctaggaaatggaggttacggtgacctgagatcatgccactgcactccagcctggcaacagaacaagactccatctcaaaaaaaggtagagattagacaggttaaatgtgtccagattcacacagttaagcttagaagtagcaacattatcatttaaaaacctgtctctctgacagcaagcccttaaccattcgtaattactgcactttaagacaaggggttggcattctttagagaatatgtctgtatagaattccaatttttcatccttttcctctccaacttacctcaggaaccagcttgagttagaactaaaacaggaaaaagaaagaagattacaaaacgacaggagcatcccaggaaggggttcccagaagtcagaatccaagatggtaatatttgctattcccttgttcttttacttaatttcagtttaaattttagaggctaccttgatagtcctgtcagttttcctttacagatcacatacttagtggctgtgtcctcaagtatgtagatagcaaactagtaattatgtgaacaaatgaaagcttgattctgagtctgcctctaggatactttctccaacttgatttcatttggaaagggggattttaataatcacagtgaccctatttcccttttaataattttttaagtaagattattttggtgtcttaacaaaaatatatgtttcttggatttctgctaaataataattttaataaaatagtataataatccctctccaaccctgaattcccctttaacagaattttcctcaatgtggatttgcttctgtatacctttttcaaatcatgaggatttcattttgagtatccttaaggaacttctcgtgggaataattagggaattaggcttgaggaaaggaaggtaatacagaataaagagcaaaagtagaaatttctacataataatcttagaaggagacccctccagcacctccagtgatgaaggagctacaattgggtaagatcatctctggggcccaggaaataatgaaatcagaaaaacataaaataactttttctgtaaaagacagtgaaaaaattgccttctgtgtgtacatattatacaaggcgacttcaaaaagatcatgggaaatggaattaaaaggtaaagatatataaactttatttctcaacctaagttccatcaagttcaagagactttagtaagtgatgatactagtcatgtaggccatccctgaagaactgagggtcctaggaatttaatcatatcaatacaatcttttttacattattaactgaagaaaaattggtgcactttaatgatgttttaagattaggaaacaaaaagaaatcagaggcaccaaatcaggactgtaaagtggatgcctaatgatttcccatcataactctcacagaattgccattgtctgatgagaggaatgagttaggagcatatttctggtggaatagcactctctgttgaagctttcctgggcatttttgtgctaaaactttggctaactttctcaaaacattcatcacaagtattagccaggtgtggtggcacatgcctctagtctctagtcccagctacttgggaggctgaggcatgagaatcacttgaacctgggaggtagaggttgcagtgagccaagatcacaccactgcactccagcctgggtgacagagcaacactctgtccccaaaaataaaaaaaattaaaaacactctcacaataagcagatgttggcattctctggccttccagaaagtcaacaagcaaaatgccttcagcatccctaaaaactgttgccatgacctttgcttttgacccgtctgcttttgctttgattgcaccacttccacctcttcatagccattgctttgattgtgctttgtcttcaggattgtactatgaagttgttacatctcctgttacaatttctcaaacaaatgcttcaggttcttgatcccacttgtttataatttccattgaaagctatacttttgtctgcagctgatacgggcacaacagttttggcacccatcaagtagaaagtttactcaactttaatttttcaaccagaattgtataagcctaaccaattgagatatctgtggtgttggctattgtttctactgttaattgttggtcctcttcaattagagcatgaacaagatcctcacaaattgatgtggatagtctgctactgcaggcttcatcttcaacatcatctggccccttcttaaagtgagttatccttttgtaaactgcccacttctttggggacaatcctaaagcattgtccccaaaagctttttgtaaagcatcaataatttcacaattcttccatccatgcttcaccaccaatttgatgtttgttcttgcttcaattttagcagaattcatattactctgataggggctcttttttcttttcttttcttttcttttttttttttttgaaacagagtctcattctcacctagaactgagtacagtggcacaatcatgcctcactgcagcctcgatttcccaggctcaggtgatcctcctgcctcagcctcctgagtagctgggactgtaggcacacaccacaaaactcagctaatttttgtatttttttggtagagtcagggttttgccatgttgtccaggctggtcttcaactcctgggctcaagcgatatgcctgcctcagcctcccaaagtgctaggatgacaggcatgagccaccgtgcccagcccggggttcttttcaaactgatgtcttatcctttttagtgactcaaaccaaatcctgattagatatattaaaataagttaatacaagtttattttggtgcgaaatatttttgaagtccatgcacagtcttttcgtaatacgcgttttccatgaactttttgaatacctctagtatataacaaagcaggaagagttcataaactatttaaaatttctagagagtgagctgctaatttactggcaaatagaaaacaatggtatgtggaaatttattaaatagtaccactactaataatttaaagtgtacaaagaaccactctaggccaggcacggtggctcacacctgtaatcccagcactttgggaggccaaggtgggcagatcatgaggtcaagagttcaagaccagcctggacaacatggtgaaaccctgtctctactaaaaatacaaaaataagccgggcatggtggtagtctcctataatcccagctactcgggaggctgaggcaggagaattggttgaacccgggaggcggaggttgcagtgagccaagactgagccactgcactccagcctgggtgacagatcaagactccatctcaaaaaaataaaaaaataataaaaaaaaacactctgtgtagcatgctatctttattattttagtttagtgaacataaaatctaaaaggcttacaaaagtttacttaaaatcttggcctacctcaccctatttttccaatgaggttttaagtttttcagtcttcagttgttgcctgcagtggcatttccaggaggataagtattgacctctcttccttgattcttgagtggtgtaagaacacacatctcagctgggtggctcacacctgtaatcctaacactttgggaggccgttggcatgaagattgcttgatcccaggagtaagagactagcctgggcaacataggaagacctcatctctacaaaaaaatttaaaaattatctcggtgtggtggctcgtgcctatagtcccagctgctcaggaggctgaggtaggaggatcacttgagcccaggaggttgaggctgcagtgagctgtgatcatgccactgcactccagcctgggcaatagcatgagaccttgtctcaaaaaacaaacaaaaagaaaacacattccacttttggatgcacatgggcagcagtcgaaggcgggcagcagtcgaaggcaagcagcagtggttgtgtgtgcctcagaaaaaaatgtagcccttagaactgcccagcaccttgccaggcacagtggctcatgcctgaactttgtgaggccaaggcgggtggattgcctgagcccaggagtttgagacaagcctgggcaacatggtgaaaccccatctctactaaaatacaaaaaagtatctgggccttgctgcgtgcacctataatcccagctactcctgatgctgaggccagagaatcgcttgaaaccaggaggcagaggttgcatgaaaccaggaggcagaggttgcagcgagccaagatcgtaccacagcactccagcctgggtgccagagtgagagtctgtctccaaaacaaacaaacaaaatttgcccaggcagggcttaagagtattggtagaaatgcagtttgaggctgggcgtggtggcttacgcctgtaatcccagcactttgggaggccaaggtgggcagactacctgggtcgggagttcaagaccatcctggccaacatggtgaaaccctgtctctactaaaatacaaaaattagccatcaatggtgggcgcctgtaatcccagctactcaggggctgaggcaggagactcgcttgaaaccaggaggcagaggctgcagtgagccgagatcatgccactgcactccagcctgggcgacagagcaagactccgtctcaaaaaaaaaaaaaaaaagagaaaagaaaaaagaaatgcagtttgaaactttacatctgtcctgccaagtagaaaattccttgagttgaacaggctatagagatggtggcactgggccgggtgcgatggctcacgcctgtactcccagcactttgggaggccgagacgggtggataatttgaggtcaggacttcgagaccagcctggccaacgtggtgaaaccccatctctactaaaaatacaaaaattagctgggcatggtggcgtgtgcctgtaatcccagctactctggaggctgaggcacaagaatcacttgaatccaagtggatcacttaaggtgaagagttcgagaccagcctggccaacatggtgaaacctcgtctctagtaaaaatacaaaaataagccaggcacggtgatgcacgcctataatcccagctactcaggaggctgagacacaagaatcgcttgaacccgggaggcagaggctgcagtgagacgagatggcaccagtgcactccagcctgggcgacagagcgagactctgtctccaaaaagaaagaaaaatattgtggcactggggcatcaacttgattgaacgtccagaggattatagtctgctgtatatggccatccttggttttaccagtttttcagagctcagtctggggaaaagaaaaaaaaaattatacttcccctaagaagtaactgatatctggagccaactttgcaagtaagtagaatacattctgaattttatttgaatctcaagaattaaaatattactttgaaaatcatttgtcacaaactgtcagaataattaagaaactacttagagcaaagaatgaggaaacatagcttgaaagttagatcccttccctaataaaaaaagctacttagctttatacccaaactaaggcattgcagaagaaaatatttgcaatatcattatttagcattctgaataattaataaattgggctgttttcttttggcaggatgggaagcacaaaatgcaagaggaaaatgttaaactaaaa

SEQ ID NO: 13884 - DNA, 562 bp, Homo sapiens
cacaattacgattggatgttgagaaagaactggagatgcagatcagcatgaggcaggagatggaattggctatgaagatgctggagaaggatgtctgtgagaagcaggatgccctggtatctcttcggcagcagctggatgacctcagagctctcaagcatgaacttgcctttaagctgcagagttcagacttaggagtaaaacagaaaagtgaactaaacagtcgcttggaagagaagactaatcagatggctgctaccattaaacaacttgaacaaagttcatgtggctcacatccagattgcgccaggctgagcgaagccgccaatctgctgagttggacaaccggctcttcaaacaggactttggagacaagatcaacagtctgcagctggaagtcgaggagctcaccaggcagcggaaccagcttgagttagaactaaaacaggaaaaagaaagaagattacaaaacgacaggagcatcccaggaaggggttcccagaagtcagaatccaagatggatgggaagcacaaaatgcaagaggaaaatgttaaactaaaa

SEQ ID NO: 13885 - DNA, 12941 bp, Homo sapiens
ctggaagtcgaggagctcaccaggcagcggtgaagagggggtagcttgagctgacagggtggtcatgggtaattcttagggtagacagcaagaaaaggggtctcatgacttccagccaggttggctctgtctttgcaatgtcctttctctggaattggaattcagaaagcttcacgtacttcaacattccccaaatccgatcaacatgctttgtgatcaaagaattaggaaattagagcccaagatcccagataaatagtaattattagccaaaataacactaataataatatgtaatatttcctgaattcttactgtgtgccagatactttaggcacttcacatgcaaactctcctaatatcttcatatcaaccctattagtgatattattgcctccactttcagattaaagtagagcttaaggctgggcgcagtggttcatgcctgtaatcccagcactttgggaggccaaggcaggtgtatcacctgaggtcaggagttccagaccagcctggccaagatggtgaaaccccatctctactaaaaatacaaaaatttgccagacatagtggtgggtgccagtaatcccagctactcgggaggctgaggcaggagaattgcttgaacctaggaaatggaggttacggtgacctgagatcatgccactgcactccagcctggcaacagaacaagactccatctcaaaaaaaggtagagattagacaggttaaatgtgtccagattcacacagttaagcttagaagtagcaacattatcatttaaaaacctgtctctctgacagcaagcccttaaccattcgtaattactgcactttaagacaaggggttggcattctttagagaatatgtctgtatagaattccaatttttcatccttttcctctccaacttacctcaggaaccagcttgagttagaactaaaacaggaaaaagaaagaagattacaaaacgacaggagcatcccaggaaggggttcccagaagtcagaatccaagatggtaatatttgctattcccttgttcttttacttaatttcagtttaaattttagaggctaccttgatagtcctgtcagttttcctttacagatcacatacttagtggctgtgtcctcaagtatgtagatagcaaactagtaattatgtgaacaaatgaaagcttgattctgagtctgcctctaggatactttctccaacttgatttcatttggaaagggggattttaataatcacagtgaccctatttcccttttaataattttttaagtaagattattttggtgtcttaacaaaaatatatgtttcttggatttctgctaaataataattttaataaaatagtataataatccctctccaaccctgaattcccctttaacagaattttcctcaatgtggatttgcttctgtatacctttttcaaatcatgaggatttcattttgagtatccttaaggaacttctcgtgggaataattagggaattaggcttgaggaaaggaaggtaatacagaataaagagcaaaagtagaaatttctacataataatcttagaaggagacccctccagcacctccagtgatgaaggagctacaattgggtaagatcatctctggggcccaggaaataatgaaatcagaaaaacataaaataactttttctgtaaaagacagtgaaaaaattgccttctgtgtgtacatattatacaaggcgacttcaaaaagatcatgggaaatggaattaaaaggtaaagatatataaactttatttctcaacctaagttccatcaagttcaagagactttagtaagtgatgatactagtcatgtaggccatccctgaagaactgagggtcctaggaatttaatcatatcaatacaatcttttttacattattaactgaagaaaaattggtgcactttaatgatgttttaagattaggaaacaaaaagaaatcagaggcaccaaatcaggactgtaaagtggatgcctaatgatttcccatcataactctcacagaattgccattgtctgatgagaggaatgagttaggagcatatttctggtggaatagcactctctgttgaagctttcctgggcatttttgtgctaaaactttggctaactttctcaaaacattcatcacaagtattagccaggtgtggtggcacatgcctctagtctctagtcccagctacttgggaggctgaggcatgagaatcacttgaacctgggaggtagaggttgcagtgagccaagatcacaccactgcactccagcctgggtgacagagcaacactctgtccccaaaaataaaaaaaattaaaaacactctcacaataagcagatgttggcattctctggccttccagaaagtcaacaagcaaaatgccttcagcatccctaaaaactgttgccatgacctttgcttttgacccgtctgcttttgctttgattgcaccacttccacctcttcatagccattgctttgattgtgctttgtcttcaggattgtactatgaagttgttacatctcctgttacaatttctcaaacaaatgcttcaggttcttgatcccacttgtttataatttccattgaaagctatacttttgtctgcagctgatacgggcacaacagttttggcacccatcaagtagaaagtttactcaactttaatttttcaaccagaattgtataagcctaaccaattgagatatctgtggtgttggctattgtttctactgttaattgttggtcctcttcaattagagcatgaacaagatcctcacaaattgatgtggatagtctgctactgcaggcttcatcttcaacatcatctggccccttcttaaagtgagttatccttttgtaaactgcccacttctttggggacaatcctaaagcattgtccccaaaagctttttgtaaagcatcaataatttcacaattcttccatccatgcttcaccaccaatttgatgtttgttcttgcttcaattttagcagaattcatattactctgataggggctcttttttcttttcttttcttttcttttttttttttttgaaacagagtctcattctcacctagaactgagtacagtggcacaatcatgcctcactgcagcctcgatttcccaggctcaggtgatcctcctgcctcagcctcctgagtagctgggactgtaggcacacaccacaaaactcagctaatttttgtatttttttggtagagtcagggttttgccatgttgtccaggctggtcttcaactcctgggctcaagcgatatgcctgcctcagcctcccaaagtgctaggatgacaggcatgagccaccgtgcccagcccggggttcttttcaaactgatgtcttatcctttttagtgactcaaaccaaatcctgattagatatattaaaataagttaatacaagtttattttggtgcgaaatatttttgaagtccatgcacagtcttttcgtaatacgcgttttccatgaactttttgaatacctctagtatataacaaagcaggaagagttcataaactatttaaaatttctagagagtgagctgctaatttactggcaaatagaaaacaatggtatgtggaaatttattaaatagtaccactactaataatttaaagtgtacaaagaaccactctaggccaggcacggtggctcacacctgtaatcccagcactttgggaggccaaggtgggcagatcatgaggtcaagagttcaagaccagcctggacaacatggtgaaaccctgtctctactaaaaatacaaaaataagccgggcatggtggtagtctcctataatcccagctactcgggaggctgaggcaggagaattggttgaacccgggaggcggaggttgcagtgagccaagactgagccactgcactccagcctgggtgacagatcaagactccatctcaaaaaaataaaaaaataataaaaaaaaacactctgtgtagcatgctatctttattattttagtttagtgaacataaaatctaaaaggcttacaaaagtttacttaaaatcttggcctacctcaccctatttttccaatgaggttttaagtttttcagtcttcagttgttgcctgcagtggcatttccaggaggataagtattgacctctcttccttgattcttgagtggtgtaagaacacacatctcagctgggtggctcacacctgtaatcctaacactttgggaggccgttggcatgaagattgcttgatcccaggagtaagagactagcctgggcaacataggaagacctcatctctacaaaaaaatttaaaaattatctcggtgtggtggctcgtgcctatagtcccagctgctcaggaggctgaggtaggaggatcacttgagcccaggaggttgaggctgcagtgagctgtgatcatgccactgcactccagcctgggcaatagcatgagaccttgtctcaaaaaacaaacaaaaagaaaacacattccacttttggatgcacatgggcagcagtcgaaggcgggcagcagtcgaaggcaagcagcagtggttgtgtgtgcctcagaaaaaaatgtagcccttagaactgcccagcaccttgccaggcacagtggctcatgcctgaactttgtgaggccaaggcgggtggattgcctgagcccaggagtttgagacaagcctgggcaacatggtgaaaccccatctctactaaaatacaaaaaagtatctgggccttgctgcgtgcacctataatcccagctactcctgatgctgaggccagagaatcgcttgaaaccaggaggcagaggttgcatgaaaccaggaggcagaggttgcagcgagccaagatcgtaccacagcactccagcctgggtgccagagtgagagtctgtctccaaaacaaacaaacaaaatttgcccaggcagggcttaagagtattggtagaaatgcagtttgaggctgggcgtggtggcttacgcctgtaatcccagcactttgggaggccaaggtgggcagactacctgggtcgggagttcaagaccatcctggccaacatggtgaaaccctgtctctactaaaatacaaaaattagccatcaatggtgggcgcctgtaatcccagctactcaggggctgaggcaggagactcgcttgaaaccaggaggcagaggctgcagtgagccgagatcatgccactgcactccagcctgggcgacagagcaagactccgtctcaaaaaaaaaaaaaaaaagagaaaagaaaaaagaaatgcagtttgaaactttacatctgtcctgccaagtagaaaattccttgagttgaacaggctatagagatggtggcactgggccgggtgcgatggctcacgcctgtactcccagcactttgggaggccgagacgggtggataatttgaggtcaggacttcgagaccagcctggccaacgtggtgaaaccccatctctactaaaaatacaaaaattagctgggcatggtggcgtgtgcctgtaatcccagctactctggaggctgaggcacaagaatcacttgaatccaagtggatcacttaaggtgaagagttcgagaccagcctggccaacatggtgaaacctcgtctctagtaaaaatacaaaaataagccaggcacggtgatgcacgcctataatcccagctactcaggaggctgagacacaagaatcgcttgaacccgggaggcagaggctgcagtgagacgagatggcaccagtgcactccagcctgggcgacagagcgagactctgtctccaaaaagaaagaaaaatattgtggcactggggcatcaacttgattgaacgtccagaggattatagtctgctgtatatggccatccttggttttaccagtttttcagagctcagtctggggaaaagaaaaaaaaaattatacttcccctaagaagtaactgatatctggagccaactttgcaagtaagtagaatacattctgaattttatttgaatctcaagaattaaaatattactttgaaaatcatttgtcacaaactgtcagaataattaagaaactacttagagcaaagaatgaggaaacatagcttgaaagttagatcccttccctaataaaaaaagctacttagctttatacccaaactaaggcattgcagaagaaaatatttgcaatatcattatttagcattctgaataattaataaattgggctgttttcttttggcaggatgggaagcacaaaatgcaagaggaaaatgttaaactaaaaaagcccctggaagaaagccacaggtgtttgttaatcaagtattaactaagatgtaaagttattctggggtggtgggaaggagggagttctttatatacattggcattgacaccgaccagacactgacttataatattaatatgccaggaagacatttgaagtggaagttaataataaaacgtataacatgtattaaaccaaacccattaggccatttcagaggaaagaaggatgatcaggctgtcctctcttccctgattaattcccaagctcagattatcacttaagaggttatttcccacctttactgaattggtatcccaggaaaataaagtataagtcatacatagcatttcttaacttcttaaatatatttgagtatgacttgtttctacctctgtgctaaatttcaaataagtggctgggcgcagtggctcacgcctgtaatcccagtactttgggaggccgaggcaggtggatcacctgagattagaagttcgagaccagcctgccaacatggtgaaacccggtctctactaacgatacaaaattagtcgggtctggtggtacctgcctgtaatcccaactacttgggaggccgaggcaggagaatcacttgaactcaggaggcagaggttgcagtgagccaagatagcgccactgcactccagcctgggcaatacagtgagactctgtctcaaataaaaaaaaaagttcaaataagtactctgatttctcttatgtctcatctctcatttttcctttatcttgagaatctcaaacagcttaacttcattcctttatcctaactctgtctgatttgctcatgatgaagagcataggatagtttcaaggaagctgactttttatagttattttagcaggttagaaatataattaaatattacatagtgccactgcattaaaaagtgaaggaggtccagttacatgacattctggaaaagacaaaactatggagacaaaaaaaaaaaaaaaaaatcagtggttgccagtggtaagagaaggaaggaacgaaccggtggagcacagaggatttttagggcagtggactactctgtatgatactatgatggtggatacatgtcattatacatttgaccacactatagactagacaccaccaagagtgaaccttaatgtaaactatagactctgggtgatgatgttgtgtcagtgtaggctcatcagttgtaacaaatgtaccactctggtgcagcatgttgacaaagaggccagggatggggcaggaagcatgtgggaagtctctgtactttctactcaatttgactgtgaacctaactgctctaaacataaaggtctactttaaaaggtggaggaagaggttagtgatgaggaatgataccacagtgaggttttgagagaactatacagctgtccctagccaggcttcgtcaccttaagaatgaggtagtgtgtcatctggagcaaaagtagctgctggagaagagaaaacacacagtccaatagtaagctaattatgcaggtgcttggcctaaatgtccctttctggccttgctcccaaagagcatggtttgatccagagctaactttaaactatcacccatctcacattacagaatggcataagcaaagagaagggaactagaagggccataaaattaacctgggcttccaggtgcctttcagggtcagcctcgttccaaactaaaatcaaatcatttacttgagcaaccaggagtgtcttaaatgccaacttctgatttaggtcctgagaatatggaacagtgcttccttatatctgaattgtgctctgcaacttagaatttgtttcacatttattatctccttatgattcagtattccttacaaaagtacctaatgcaactttacagatgagaaaactgagaagcagagaggctgggtgacttatccaagttgcctctgtttatcatgtctactgtttttaagtcctttggctctgcactacctattagcaacttccaggacttattctggccatagctgcaatcgttagacataccaggcttcctgggattatgatggcaaggaacatcggaaaacctggtcaccccatggtgtatgtctggtggtcacactgctactcaagtgaaaagaataagaaccattgcaatctgtagtgcattttccctgtaaccgagagcgggctttgcttcacctctcatttaggctctagtccatgctggaacatcggagttagctcagcttagtccctcatgaagaaatatttcaacctgaatgggttttctggtgacagtctcattcatttccccttcttgggttaatttgctaaagctcacatcttaagaatatttgggactgatacacaacatgtgataatggataatggatagatttccataatatcaaatagaaaaaaagctactaaaatatatggccagtgaaccattggagttttacacattgggaaacataaatgctaactattttgatagcaaaaaggaatgtaaaatataacttcaaatctatttttaaatgggaacccttatataataagtcaagggtcagattctagtgattcattttaagaagcaaagtttcctctccttggaggtcaaaattaataattatgttgttctaagtaatataaaagacctacagtatttcttgtttgaaaaaaatgtttgtattctgagctttttattgaaatgatataaatgaaaatacatgaagttcctatttgtcacaattttttacttctccattgtaggctgcaaccccaccctatggatgaacaggtaacagagcctcctgtttcaaaacatcttgtatgaattatgaagttggttgtaccgtgcctagccagcaaataaggtagcatgggcggaagatgagtgaatacagtgtgccatccttctaacaataccctgaacaaatatgtattgcctgaagctcacacaggaagtagcacagctttgagcagtttactaagtaaacatcagttctcacctattttaaattatccctgacataagatctaggagagctcactttatgtccctttcctctagtttttccttacataaaatggagagaaaaaagatgttttgatcacttagaaataagctaacataaatgattgtaaaacactttgttaatctaatagtatatgataagcccatgagaaagacagtgaatgctactgtgtctgagtcaccctgtcatttacctcttaggttataaaataaaataagtcctactgctttcctttttttttttttaaatggagataaggtcttactcacattgcccaagctggggtgcagtggacgatctcagctcactgaagcctcaacttcccgagcttaggcagtcctcccacttctgcctcccgagtagctagggctgcagagattaggtttcaccgtgttgcccaggctggtctcaaactcctgggctcaagtgatcttcccgccttggcctcccaaagtgctgggattacaggtgtgagcttccatgccctatgcttgccattctttttttccttttttttttgagacagagtctcactctgtcacccagggtggagtgttgtggcacaatctcagctcactgcaacctccgcctcccaggttcaagtgattcccctgcctcagcctcccgagtagctgggattacaggcgcccaccaccatgtccaactttttttttttttaatatatatatttttggtagagatggagttttgccatgttggccaggctggtcttgaactcctgacctcaagtgatctacctgccttggcctcccaaagtgctggcattacaggcgtgagccaccaggcccagtccccagtgctttccattcttgatggtagagtgaacaagaggaatgggatagtgttaaaactttttactctatacttgcatgtgtttgaattttctttttagaaatcatgttattataaaaattaagagctggaagcataatgataggattatccgagttgtattatggtggtaggactacctatttataattggtttagtttccagatagtctatagtgtgattatattaatattgtaggtaaaaaatgcatattctgaaagtactaatatttctggcactaagaaaaactaaccagctccctgtgtggtttaggatcagctgctgctctctgaaaagccacagttgtgtcagctatgccaggaagacggcagcctaacaaaggtaactgtgatgagaaacggacaggcttttcatagggatgtctacagcagcccccagtccctccccaggagtaacagggactttcccgcatagagtgcagagtgcatgcagagtgctgggagtggggtgaaaagcaaaaggggcaagcatttactgggtacctgttttttcagtcataataattcatgtcagaaaattcccattaaaataaacataaatagccaggcgcggtgactcacgcctgtaatcccagcattttgggaggccgaggcgggccgatcacaaggtcaggagttcaagaccagcctgatcaacatggtaaaaccccgtctgtactaaaaatacaaaaaaaaaaaaaaaaaaaaatagccgggcgtggtggcctgtaatcccagctactcaggttgctgaggcaggagaatcgcttgaacccgggaggcggaggttgcagtgagccaagatcacaccattgcactccagcctgggcaacagagcgagactctgtctaaaaataagtaaataaataaacaaacaaaaataattatgtaataaagcaaataagcagatagaaatgtataagtaaatattgagtgcctgctgtgtagaatgtgctggagaaagagtaatgaacaaagtagaccaagtctctgttcttgtcaagcttatgtccttcatagctgtcattttatagatgaagaacgttgaacatctaatgctaactacatttcccaaaattaagtcataagtgatgaagcccagcttccaacctagctttcgctccaaagtccacagtcctttcagcactttatcctgctcagaacaggatatgagctctccctgctagaccacttgttttccacccgatcctcaagggtgcctgcctgagcatcttcccagtttgttatcctagagtaggcagagttaaggaagtattcagaaagaatgagtgcccttgatagctggaactgtgtcttgttcacagaatcccccagcatctaatatggtacccaatccatagtagatcctcaagaaaagttatgtacaaatgagtgtatgaaacacatgcttggaagagatacaggaaacaggctcaaattctggatcacaacctgcatagcaccatctgtgatcatgcaaaattttaataaattataatatgacctagtcttaaattcacagaatcagataacaaatgaactgcccttatagaactggaagttacaattatagaaatatgttacaaagtagaacaaactgttaattctggctttcctcttctaagccatgcaatattagcttctgtatgtcagacaaaaattcttcttaggctttcagataaaagcaaccccctactcctctcaacctcaggaagatgaattatttgggatgaaggtagcacttcatgggagaaattattctttacagctttttatataggacccttggagctttgtgtataccaccctatcacagccttactgctgacattgctatagtgacttcttgctctctgtgcttgaccattaaagatgcaaaacatttaggaaaacaaaataatttccctatgaacaagatgcaggaagctgtgctcctgctgcattgataacccagtggatgtgcttacagagcaccagagaccacaggaaagcataaagcacatcagtgtatttattaggaattatactttcagttcatactctggacatttttaaatcttagcctgttcactcaatccattgctctttcactgccttatttggagtatgcgcaggtacttgcaaactaattttaaaactaacctacctcaaagtgagtatggggaacagatgtgtgaaggatattctaaagataagtgacttgtatgttacctgtttttatttttaactctatggcactgcttcttttcatttaaatctaaaaactagacggtgaacttttttgtagattgggcctgtgttcagatactacctggcacatagtaaacattcagtcattgtttgattaggcattgagcatttgccatatttggctttttatatcccatgaatccttatgccttgctcatcttctattccccgcctaacctcctcttctcatagaatgtgtgtaagaactgcagcggaaccttctgtgatgcctgttcaacaaatgaactgcctcttccttcaagtatcaagcttgagcgagtttgcaatccctgtcacaagcatctgatgaagcaatattctaccagcccatcataagactggaggccaagacctggaccaaaacgtttatgcaggctcctctgtacctgtgttttagctgtcaggatctcatagagcccagttcttagagtcaactaaagagttgataggaatttactaggtccagggagaaaaggcagtggttggggttact

SEQ ID NO: 13886 - DNA, 495 bp, Homo sapiens
ctggaagtcgaggagctcaccaggcagcggaaccagcttgagttagaactaaaacaggaaaaagaaagaagattacaaaacgacaggagcatcccaggaaggggttcccagaagtcagaatccaagatggatgggaagcacaaaatgcaagaggaaaatgttaaactaaaaaagcccctggaagaaagccacagaatgtgtgtaagaactgcagcggaaccttctgtgatgcctgttcaacaaatgaactgcctcttccttcaagtatcaagcttgagcgagtttgcaatccctgtcacaagcatctgatgaagcaatattctaccagcccatcataagactggaggccaagacctggaccaaaacgtttatgcaggctcctctgtacctgtgttttagctgtcaggatctcatagagcccagttcttagagtcaactaaagagttgataggaatttactaggtccagggagaaaaggcagtggttggggttact

SEQ ID NO: 13887 - DNA, 17933 bp, Homo sapiens
gagctctcaagcatgaacttgcctttaagctgcaggtaggggaaatatgaggaatagactcactggctctctaaaatcctggggcttccctcctcccatctgatcctccagaatcacactttaattacaagaggaaagaatcacatctcattttgatgctagctgccagtaaactactttcagaatcagacaaccatgggatcctgtattgctgttctagaaaaccatggccacttttcacattatagtagaggatgagggtcttttttatcctatagggtaatttctactctgcagtctaccgtgccagctaagttatatattctattagcttttacactggaatgtgatacattgatgaactattactgtgatcacactgcatataacaatactaactttagataaattgcttttttttccatttcaggattaactgatattgaaatatatgaacatttctgttttcccacttaccattagattcaaaaggcatgtgtggttgtattttaggatttatgttatacaggttgtttatcgttattttccataacagagttcagacttaggagtaaaacagaaaagtgaactaaacagtcgcttggaagagaagactaatcagatggctgctaccattaaacaacttgaacaaaggtaaaagtcctgtttctttaatgaaacactttggattgtcagtgctgaagtgaaaagaatgtgctgtacattcggcaaatagaaaatacatgaaattcttccaaattagcatcagacattctggtagaaaaaagccagttgaatgttatgtgtgttttctaaggtatgactgaaatgtttttaggaaatgtcaatcacttgactagcctttaaaaaaaaaaaagaaaggtcagccttttatgactgttttgaacatcagaactcttaatccatgtcagagtcatgtgttagaggaaggatacttaaaagcatggaaggactcttaaatgtatgtatgtaattctgtgattttattgttcatcactgaagtctttgaatacttggatgctaggggatatagaggcactgagagataggtgtcctccaaggatctattctggatctttctctcccttctttaacccttttctcttatctcccttttctttctcctgggtagttctgtagcttccactgtcacctccagtgtgttttcccagctcttaccttcatctggagaccagtcttgagttttcatcctttgggcagctatcttccaccagtatctacaattcagtctgcccaaagcacatcttcttcctatgctactctctttctgtgcttatgtgaaaccaccattttctctctggcaacttagcagccaagagaaatggctgagtcttcaaggatgaatgtgacgtggtacccaaggtcatttgatgtttctacccttaacacctgtttgtcacccttcttgcacttgagcaaaactaaactgctggtccctgtacttcccatttttcccatttatttctttcccaatagttccaccaattagaaatgtcctaattcttcccactcccttattcgtcagatacatttttaagtttaggctcaaatgccacctccccagagtttcctctgatacctctttgcagctagaaatgatctgtctttctgggaactcccatagcttcatactcatatctatctatactgcttatggcacttctcactgtctactgtaccttttaactctttatatatgtctcctccgatgcgagtgtaagctccctgagattagttaacgaatcttttaagttcccgtattagatctgtcgcagtgccttgaatatacaagcattcattcagtagatatatgaatgaatggattaatgggtgatttcttatattcagatgattcttaaccagtaagggtcctgaacagcagtgcatattaatgttaactcaaaacttaatggcaaatttataaataaacctgaaacctcttacatagccaaatacaaatgtatcagtctacctaggaaagatggttaggtacttgctcataaacagttatatgtttatgatttaacaaaatgattttactgttcataaattgtgcttttgaaatgaaatgtatcaaatttcttttcaatgatgttttgacttggaatttaaagcaaacagaaagagaataatgacttatctctttgagtattaagctgacttattctcttgctatttttgtgtttcctgtttatccattttctcattctcctttcacttcattgtcatttttattttatttagtgaaaaggatttggtgaaacaggcaaagaccttaaatagtgcagcaaataaactgatcccaaaacatcattaggcatttttaagttggtcacgtcgcaagtccgatatcacaacttaattgtaaaaggaagaaatctgaaagttactacatttaagctctgattctatataaaatgtcaccaaaaagttgactttgaatttgttggacttttaaaaaaccagttggaaatataggttgggtttttttcttattgttttctccccagggttagaaaaattggtataagttcctaattaaaagctgaataaactttgagaaattatttctgagttgaccaataaataaaaataccactttctttaaaaaagcctagggaattgaagctctgtacatatactaatgatgcctttacaacccagtccttgataataccagattctcggtgcattgttcatgtctgtatctgcaagcctgttctgccattgcagtgtgatgaacctagaggtaactaccatgtgaacttgaactcttctaaaatagttctgtgtctcttagaccatgaccccttttcacttttgttatataggtttaatccccaagccaaggatagtacttagtatttcactacacttctattctcagtaaccaagattgcttgcaactttttttgccttggtgacttttgaaaaaaaaagaaaagaaaaagcagcatccttatatttctttaaaatacatagaaataaagttagtaattaggtaacctatgataacataataatgtggacgcctggggaaaccctcctcatgtttgtcatcttctacctctgccgttttcctgcaattccgcttcctacttaggcagttcagagagaacaattctaataaaaacactcctctcctattaacaaaaaatgatgcagtacccatttttcgtatcctgcttttcttatattggagtaaaaaggacagggtatagacatgaatgatgatattctgcctggcctgtcatttcttacctggaaacatttacttaagagtttctgttactttttgttcagatggggatttgctaaaggttctgggaagctaataattgaattattagaaaaacatttcagaataggaagtaaatgataaacttatattctttattattatttagtacaaaaatagattcccagtagatatccacaagcaatattagcagggcttctgtttctaagtgaccacagactaaccctttctaggctttaacattgtaaataatcctataaacagtttgattttttaagatgatttttgatttgaagagacaggctttacataagccttcattccttcaaaaggtcctgacaaaatacttgggtttttttctctttttttcattctggtatgctttgcagcatttcagctgctttggtggggacacagataaccccttcgcttccagctcttaaaattctttatctttttcttggcaaaaccagaattaagagtgtaagatagattccatgtgtgcttatataggtccctgcacagattggacttgaaccaaaattaagtccaaagaacatatgtttagaccaacttcatggaagtggaagatcctgtgctcttgaacttattttaattcttataatttgcacctatataaacaaagctcctactgtattcttctcttcatcaaccttttgtggtgatgggttgccttttctacgagcatttggaaggagtgatcaaataccgaaattgaactttctaaaacctacacatagcatgcgtttaaattctattatataaagccccaagtgctttaccttctaaaacatgcttctctataggtgcaaagttataagatatgtagaagaaaacatccatcagaatcttctggagaatatggtcagagtcttaaacaggcccagtgctgagttctttgtccacttagtcacacatcttttgtgggaatgggaaaggaaggagacagccaaactctgacaaaggcttttccttatagaataacccaaagcctaggtgagggttgatatataatgtcccatgatttaatatatgtggtttgggggaaaggacaagaaaaaactataattccacatataagaaggtagttgcccatttacaagttccagttatgtgtgtaaaacagaaaaattaagtaccaaacctattaggaaatttttttaaaaagtggatttaacttaaattactgtgtacttgaggttggctttggatatggattttctaaaaagtgatgttttattgtttatcatctaatggctgtaaactgtagtactagaataaaaaaaatggaaaatcagcttttcctctgcctggttcaccttcatcttacttttctttagaatttgtttcttctccatcttttcccccccataatttcttcacctgtgtcctgcaaagtttttttcctctctctgtctctctgtgcattcttccttgggttattttattttgtgttgtgaacttggtcttcttccccaccatggcttttgttttttatcacaagttcatgtggctcacatccagattgcgccaggctgagcgaagccgccaatctgctgagttggacaaccggctcttcaaacaggactttggagacaagatcaacagtctgcagctggaagtcgaggagctcaccaggcagcggtgaagagggggtagcttgagctgacagggtggtcatgggtaattcttagggtagacagcaagaaaaggggtctcatgacttccagccaggttggctctgtctttgcaatgtcctttctctggaattggaattcagaaagcttcacgtacttcaacattccccaaatccgatcaacatgctttgtgatcaaagaattaggaaattagagcccaagatcccagataaatagtaattattagccaaaataacactaataataatatgtaatatttcctgaattcttactgtgtgccagatactttaggcacttcacatgcaaactctcctaatatcttcatatcaaccctattagtgatattattgcctccactttcagattaaagtagagcttaaggctgggcgcagtggttcatgcctgtaatcccagcactttgggaggccaaggcaggtgtatcacctgaggtcaggagttccagaccagcctggccaagatggtgaaaccccatctctactaaaaatacaaaaatttgccagacatagtggtgggtgccagtaatcccagctactcgggaggctgaggcaggagaattgcttgaacctaggaaatggaggttacggtgacctgagatcatgccactgcactccagcctggcaacagaacaagactccatctcaaaaaaaggtagagattagacaggttaaatgtgtccagattcacacagttaagcttagaagtagcaacattatcatttaaaaacctgtctctctgacagcaagcccttaaccattcgtaattactgcactttaagacaaggggttggcattctttagagaatatgtctgtatagaattccaatttttcatccttttcctctccaacttacctcaggaaccagcttgagttagaactaaaacaggaaaaagaaagaagattacaaaacgacaggagcatcccaggaaggggttcccagaagtcagaatccaagatggtaatatttgctattcccttgttcttttacttaatttcagtttaaattttagaggctaccttgatagtcctgtcagttttcctttacagatcacatacttagtggctgtgtcctcaagtatgtagatagcaaactagtaattatgtgaacaaatgaaagcttgattctgagtctgcctctaggatactttctccaacttgatttcatttggaaagggggattttaataatcacagtgaccctatttcccttttaataattttttaagtaagattattttggtgtcttaacaaaaatatatgtttcttggatttctgctaaataataattttaataaaatagtataataatccctctccaaccctgaattcccctttaacagaattttcctcaatgtggatttgcttctgtatacctttttcaaatcatgaggatttcattttgagtatccttaaggaacttctcgtgggaataattagggaattaggcttgaggaaaggaaggtaatacagaataaagagcaaaagtagaaatttctacataataatcttagaaggagacccctccagcacctccagtgatgaaggagctacaattgggtaagatcatctctggggcccaggaaataatgaaatcagaaaaacataaaataactttttctgtaaaagacagtgaaaaaattgccttctgtgtgtacatattatacaaggcgacttcaaaaagatcatgggaaatggaattaaaaggtaaagatatataaactttatttctcaacctaagttccatcaagttcaagagactttagtaagtgatgatactagtcatgtaggccatccctgaagaactgagggtcctaggaatttaatcatatcaatacaatcttttttacattattaactgaagaaaaattggtgcactttaatgatgttttaagattaggaaacaaaaagaaatcagaggcaccaaatcaggactgtaaagtggatgcctaatgatttcccatcataactctcacagaattgccattgtctgatgagaggaatgagttaggagcatatttctggtggaatagcactctctgttgaagctttcctgggcatttttgtgctaaaactttggctaactttctcaaaacattcatcacaagtattagccaggtgtggtggcacatgcctctagtctctagtcccagctacttgggaggctgaggcatgagaatcacttgaacctgggaggtagaggttgcagtgagccaagatcacaccactgcactccagcctgggtgacagagcaacactctgtccccaaaaataaaaaaaattaaaaacactctcacaataagcagatgttggcattctctggccttccagaaagtcaacaagcaaaatgccttcagcatccctaaaaactgttgccatgacctttgcttttgacccgtctgcttttgctttgattgcaccacttccacctcttcatagccattgctttgattgtgctttgtcttcaggattgtactatgaagttgttacatctcctgttacaatttctcaaacaaatgcttcaggttcttgatcccacttgtttataatttccattgaaagctatacttttgtctgcagctgatacgggcacaacagttttggcacccatcaagtagaaagtttactcaactttaatttttcaaccagaattgtataagcctaaccaattgagatatctgtggtgttggctattgtttctactgttaattgttggtcctcttcaattagagcatgaacaagatcctcacaaattgatgtggatagtctgctactgcaggcttcatcttcaacatcatctggccccttcttaaagtgagttatccttttgtaaactgcccacttctttggggacaatcctaaagcattgtccccaaaagctttttgtaaagcatcaataatttcacaattcttccatccatgcttcaccaccaatttgatgtttgttcttgcttcaattttagcagaattcatattactctgataggggctcttttttcttttcttttcttttcttttttttttttttgaaacagagtctcattctcacctagaactgagtacagtggcacaatcatgcctcactgcagcctcgatttcccaggctcaggtgatcctcctgcctcagcctcctgagtagctgggactgtaggcacacaccacaaaactcagctaatttttgtatttttttggtagagtcagggttttgccatgttgtccaggctggtcttcaactcctgggctcaagcgatatgcctgcctcagcctcccaaagtgctaggatgacaggcatgagccaccgtgcccagcccggggttcttttcaaactgatgtcttatcctttttagtgactcaaaccaaatcctgattagatatattaaaataagttaatacaagtttattttggtgcgaaatatttttgaagtccatgcacagtcttttcgtaatacgcgttttccatgaactttttgaatacctctagtatataacaaagcaggaagagttcataaactatttaaaatttctagagagtgagctgctaatttactggcaaatagaaaacaatggtatgtggaaatttattaaatagtaccactactaataatttaaagtgtacaaagaaccactctaggccaggcacggtggctcacacctgtaatcccagcactttgggaggccaaggtgggcagatcatgaggtcaagagttcaagaccagcctggacaacatggtgaaaccctgtctctactaaaaatacaaaaataagccgggcatggtggtagtctcctataatcccagctactcgggaggctgaggcaggagaattggttgaacccgggaggcggaggttgcagtgagccaagactgagccactgcactccagcctgggtgacagatcaagactccatctcaaaaaaataaaaaaataataaaaaaaaacactctgtgtagcatgctatctttattattttagtttagtgaacataaaatctaaaaggcttacaaaagtttacttaaaatcttggcctacctcaccctatttttccaatgaggttttaagtttttcagtcttcagttgttgcctgcagtggcatttccaggaggataagtattgacctctcttccttgattcttgagtggtgtaagaacacacatctcagctgggtggctcacacctgtaatcctaacactttgggaggccgttggcatgaagattgcttgatcccaggagtaagagactagcctgggcaacataggaagacctcatctctacaaaaaaatttaaaaattatctcggtgtggtggctcgtgcctatagtcccagctgctcaggaggctgaggtaggaggatcacttgagcccaggaggttgaggctgcagtgagctgtgatcatgccactgcactccagcctgggcaatagcatgagaccttgtctcaaaaaacaaacaaaaagaaaacacattccacttttggatgcacatgggcagcagtcgaaggcgggcagcagtcgaaggcaagcagcagtggttgtgtgtgcctcagaaaaaaatgtagcccttagaactgcccagcaccttgccaggcacagtggctcatgcctgaactttgtgaggccaaggcgggtggattgcctgagcccaggagtttgagacaagcctgggcaacatggtgaaaccccatctctactaaaatacaaaaaagtatctgggccttgctgcgtgcacctataatcccagctactcctgatgctgaggccagagaatcgcttgaaaccaggaggcagaggttgcatgaaaccaggaggcagaggttgcagcgagccaagatcgtaccacagcactccagcctgggtgccagagtgagagtctgtctccaaaacaaacaaacaaaatttgcccaggcagggcttaagagtattggtagaaatgcagtttgaggctgggcgtggtggcttacgcctgtaatcccagcactttgggaggccaaggtgggcagactacctgggtcgggagttcaagaccatcctggccaacatggtgaaaccctgtctctactaaaatacaaaaattagccatcaatggtgggcgcctgtaatcccagctactcaggggctgaggcaggagactcgcttgaaaccaggaggcagaggctgcagtgagccgagatcatgccactgcactccagcctgggcgacagagcaagactccgtctcaaaaaaaaaaaaaaaaagagaaaagaaaaaagaaatgcagtttgaaactttacatctgtcctgccaagtagaaaattccttgagttgaacaggctatagagatggtggcactgggccgggtgcgatggctcacgcctgtactcccagcactttgggaggccgagacgggtggataatttgaggtcaggacttcgagaccagcctggccaacgtggtgaaaccccatctctactaaaaatacaaaaattagctgggcatggtggcgtgtgcctgtaatcccagctactctggaggctgaggcacaagaatcacttgaatccaagtggatcacttaaggtgaagagttcgagaccagcctggccaacatggtgaaacctcgtctctagtaaaaatacaaaaataagccaggcacggtgatgcacgcctataatcccagctactcaggaggctgagacacaagaatcgcttgaacccgggaggcagaggctgcagtgagacgagatggcaccagtgcactccagcctgggcgacagagcgagactctgtctccaaaaagaaagaaaaatattgtggcactggggcatcaacttgattgaacgtccagaggattatagtctgctgtatatggccatccttggttttaccagtttttcagagctcagtctggggaaaagaaaaaaaaaattatacttcccctaagaagtaactgatatctggagccaactttgcaagtaagtagaatacattctgaattttatttgaatctcaagaattaaaatattactttgaaaatcatttgtcacaaactgtcagaataattaagaaactacttagagcaaagaatgaggaaacatagcttgaaagttagatcccttccctaataaaaaaagctacttagctttatacccaaactaaggcattgcagaagaaaatatttgcaatatcattatttagcattctgaataattaataaattgggctgttttcttttggcaggatgggaagcacaaaatgcaagaggaaaatgttaaactaaaaaagcccctggaagaaagccacaggtgtttgttaatcaagtattaactaagatgtaaagttattctggggtggtgggaaggagggagttctttatatacattggcattgacaccgaccagacactgacttataatattaatatgccaggaagacatttgaagtggaagttaataataaaacgtataacatgtattaaaccaaacccattaggccatttcagaggaaagaaggatgatcaggctgtcctctcttccctgattaattcccaagctcagattatcacttaagaggttatttcccacctttactgaattggtatcccaggaaaataaagtataagtcatacatagcatttcttaacttcttaaatatatttgagtatgacttgtttctacctctgtgctaaatttcaaataagtggctgggcgcagtggctcacgcctgtaatcccagtactttgggaggccgaggcaggtggatcacctgagattagaagttcgagaccagcctgccaacatggtgaaacccggtctctactaacgatacaaaattagtcgggtctggtggtacctgcctgtaatcccaactacttgggaggccgaggcaggagaatcacttgaactcaggaggcagaggttgcagtgagccaagatagcgccactgcactccagcctgggcaatacagtgagactctgtctcaaataaaaaaaaaagttcaaataagtactctgatttctcttatgtctcatctctcatttttcctttatcttgagaatctcaaacagcttaacttcattcctttatcctaactctgtctgatttgctcatgatgaagagcataggatagtttcaaggaagctgactttttatagttattttagcaggttagaaatataattaaatattacatagtgccactgcattaaaaagtgaaggaggtccagttacatgacattctggaaaagacaaaactatggagacaaaaaaaaaaaaaaaaaatcagtggttgccagtggtaagagaaggaaggaacgaaccggtggagcacagaggatttttagggcagtggactactctgtatgatactatgatggtggatacatgtcattatacatttgaccacactatagactagacaccaccaagagtgaaccttaatgtaaactatagactctgggtgatgatgttgtgtcagtgtaggctcatcagttgtaacaaatgtaccactctggtgcagcatgttgacaaagaggccagggatggggcaggaagcatgtgggaagtctctgtactttctactcaatttgactgtgaacctaactgctctaaacataaaggtctactttaaaaggtggaggaagaggttagtgatgaggaatgataccacagtgaggttttgagagaactatacagctgtccctagccaggcttcgtcaccttaagaatgaggtagtgtgtcatctggagcaaaagtagctgctggagaagagaaaacacacagtccaatagtaagctaattatgcaggtgcttggcctaaatgtccctttctggccttgctcccaaagagcatggtttgatccagagctaactttaaactatcacccatctcacattacagaatggcataagcaaagagaagggaactagaagggccataaaattaacctgggcttccaggtgcctttcagggtcagcctcgttccaaactaaaatcaaatcatttacttgagcaaccaggagtgtcttaaatgccaacttctgatttaggtcctgagaatatggaacagtgcttccttatatctgaattgtgctctgcaacttagaatttgtttcacatttattatctccttatgattcagtattccttacaaaagtacctaatgcaactttacagatgagaaaactgagaagcagagaggctgggtgacttatccaagttgcctctgtttatcatgtctactgtttttaagtcctttggctctgcactacctattagcaacttccaggacttattctggccatagctgcaatcgttagacataccaggcttcctgggattatgatggcaaggaacatcggaaaacctggtcaccccatggtgtatgtctggtggtcacactgctactcaagtgaaaagaataagaaccattgcaatctgtagtgcattttccctgtaaccgagagcgggctttgcttcacctctcatttaggctctagtccatgctggaacatcggagttagctcagcttagtccctcatgaagaaatatttcaacctgaatgggttttctggtgacagtctcattcatttccccttcttgggttaatttgctaaagctcacatcttaagaatatttgggactgatacacaacatgtgataatggataatggatagatttccataatatcaaatagaaaaaaagctactaaaatatatggccagtgaaccattggagttttacacattgggaaacataaatgctaactattttgatagcaaaaaggaatgtaaaatataacttcaaatctatttttaaatgggaacccttatataataagtcaagggtcagattctagtgattcattttaagaagcaaagtttcctctccttggaggtcaaaattaataattatgttgttctaagtaatataaaagacctacagtatttcttgtttgaaaaaaatgtttgtattctgagctttttattgaaatgatataaatgaaaatacatgaagttcctatttgtcacaattttttacttctccattgtaggctgcaaccccaccctatggatgaacaggtaacagagcctcctgtttcaaaacatcttgtatgaattatgaagttggttgtaccgtgcctagccagcaaataaggtagcatgggcggaagatgagtgaatacagtgtgccatccttctaacaataccctgaacaaatatgtattgcctgaagctcacacaggaagtagcacagctttgagcagtttactaagtaaacatcagttctcacctattttaaattatccctgacataagatctaggagagctcactttatgtccctttcctctagtttttccttacataaaatggagagaaaaaagatgttttgatcacttagaaataagctaacataaatgattgtaaaacactttgttaatctaatagtatatgataagcccatgagaaagacagtgaatgctactgtgtctgagtcaccctgtcatttacctcttaggttataaaataaaataagtcctactgctttcctttttttttttttaaatggagataaggtcttactcacattgcccaagctggggtgcagtggacgatctcagctcactgaagcctcaacttcccgagcttaggcagtcctcccacttctgcctcccgagtagctagggctgcagagattaggtttcaccgtgttgcccaggctggtctcaaactcctgggctcaagtgatcttcccgccttggcctcccaaagtgctgggattacaggtgtgagcttccatgccctatgcttgccattctttttttccttttttttttgagacagagtctcactctgtcacccagggtggagtgttgtggcacaatctcagctcactgcaacctccgcctcccaggttcaagtgattcccctgcctcagcctcccgagtagctgggattacaggcgcccaccaccatgtccaactttttttttttttaatatatatatttttggtagagatggagttttgccatgttggccaggctggtcttgaactcctgacctcaagtgatctacctgccttggcctcccaaagtgctggcattacaggcgtgagccaccaggcccagtccccagtgctttccattcttgatggtagagtgaacaagaggaatgggatagtgttaaaactttttactctatacttgcatgtgtttgaattttctttttagaaatcatgttattataaaaattaagagctggaagcataatgataggattatccgagttgtattatggtggtaggactacctatttataattggtttagtttccagatagtctatagtgtgattatattaatattgtaggtaaaaaatgcatattctgaaagtactaatatttctggcactaagaaaaactaaccagctccctgtgtggtttaggatcagctgctgctctctgaaaagccacagttgtgtcagctatgccaggaagacggcagcctaacaaaggtaactgtgatgagaaacggacaggcttttcatagggatgtctacagcagcccccagtccctccccaggagtaacagggactttcccgcatagagtgcagagtgcatgcagagtgctgggagtggggtgaaaagcaaaaggggcaagcatttactgggtacctgttttttcagtcataataattcatgtcagaaaattcccattaaaataaacataaatagccaggcgcggtgactcacgcctgtaatcccagcattttgggaggccgaggcgggccgatcacaaggtcaggagttcaagaccagcctgatcaacatggtaaaaccccgtctgtactaaaaatacaaaaaaaaaaaaaaaaaaaaatagccgggcgtggtggcctgtaatcccagctactcaggttgctgaggcaggagaatcgcttgaacccgggaggcggaggttgcagtgagccaagatcacaccattgcactccagcctgggcaacagagcgagactctgtctaaaaataagtaaataaataaacaaacaaaaataattatgtaataaagcaaataagcagatagaaatgtataagtaaatattgagtgcctgctgtgtagaatgtgctggagaaagagtaatgaacaaagtagaccaagtctctgttcttgtcaagcttatgtccttcatagctgtcattttatagatgaagaacgttgaacatctaatgctaactacatttcccaaaattaagtcataagtgatgaagcccagcttccaacctagctttcgctccaaagtccacagtcctttcagcactttatcctgctcagaacaggatatgagctctccctgctagaccacttgttttccacccgatcctcaagggtgcctgcctgagcatcttcccagtttgttatcctagagtaggcagagttaaggaagtattcagaaagaatgagtgcccttgatagctggaactgtgtcttgttcacagaatcccccagcatctaatatggtacccaatccatagtagatcctcaagaaaagttatgtacaaatgagtgtatgaaacacatgcttggaagagatacaggaaacaggctcaaattctggatcacaacctgcatagcaccatctgtgatcatgcaaaattttaataaattataatatgacctagtcttaaattcacagaatcagataacaaatgaactgcccttatagaactggaagttacaattatagaaatatgttacaaagtagaacaaactgttaattctggctttcctcttctaagccatgcaatattagcttctgtatgtcagacaaaaattcttcttaggctttcagataaaagcaaccccctactcctctcaacctcaggaagatgaattatttgggatgaaggtagcacttcatgggagaaattattctttacagctttttatataggacccttggagctttgtgtataccaccctatcacagccttactgctgacattgctatagtgacttcttgctctctgtgcttgaccattaaagatgcaaaacatttaggaaaacaaaataatttccctatgaacaagatgcaggaagctgtgctcctgctgcattgataacccagtggatgtgcttacagagcaccagagaccacaggaaagcataaagcacatcagtgtatttattaggaattatactttcagttcatactctggacatttttaaatcttagcctgttcactcaatccattgctctttcactgccttatttggagtatgcgcaggtacttgcaaactaattttaaaactaacctacctcaaagtgagtatggggaacagatgtgtgaaggatattctaaagataagtgacttgtatgttacctgtttttatttttaactctatggcactgcttcttttcatttaaatctaaaaactagacggtgaacttttttgtagattgggcctgtgttcagatactacctggcacatagtaaacattcagtcattgtttgattaggcattgagcatttgccatatttggctttttatatcccatgaatccttatgccttgctcatcttctattccccgcctaacctcctcttctcatagaatgtgtgtaagaactgcagcggaaccttctgtgatgcctgttcaacaaatgaactgcctcttccttcaagtatcaagcttgagcgagtttgcaatccctgtcacaagcatctgatgaagcaatattctaccagcccatcataagactggaggccaagacctggaccaaaacgtttatgcaggctcctctgtacctgtgttttagctgtcaggatctcatagagcccagttcttagagtcaactaaagagttgataggaatttactaggtccagggagaaaaggcagtggttggggttactggaaattttgctcattttctctaatgactgtatgaataaaagtgaacttacttga

SEQ ID NO: 13888 - DNA, 582 bp, Homo sapiens
gagctctcaagcatgaacttgcctttaagctgcagagttcagacttaggagtaaaacagaaaagtgaactaaacagtcgcttggaagagaagactaatcagatggctgctaccattaaacaacttgaacaaaggatgggaagcacaaaatgcaagaggaaaatgttaaactaaaaaagcccctggaagaaagccacaggctgcaaccccaccctatggatgaacagaatgtgtgtaagaactgcagcggaaccttctgtgatgcctgttcaacaaatgaactgcctcttccttcaagtatcaagcttgagcgagtttgcaatccctgtcacaagcatctgatgaagcaatattctaccagcccatcataagactggaggccaagacctggaccaaaacgtttatgcaggctcctctgtacctgtgttttagctgtcaggatctcatagagcccagttcttagagtcaactaaagagttgataggaatttactaggtccagggagaaaaggcagtggttggggttactggaaattttgctcattttctctaatgactgtatgaataaaagtgaacttacttga

SEQ ID NO: 13889 - DNA, 7344 bp, Homo sapiens
tggcgtgtgcctgtaatcccagctactctggaggctgaggcacaagaatcacttgaatccaagtggatcacttaaggtgaagagttcgagaccagcctggccaacatggtgaaacctcgtctctagtaaaaatacaaaaataagccaggcacggtgatgcacgcctataatcccagctactcaggaggctgagacacaagaatcgcttgaacccgggaggcagaggctgcagtgagacgagatggcaccagtgcactccagcctgggcgacagagcgagactctgtctccaaaaagaaagaaaaatattgtggcactggggcatcaacttgattgaacgtccagaggattatagtctgctgtatatggccatccttggttttaccagtttttcagagctcagtctggggaaaagaaaaaaaaaattatacttcccctaagaagtaactgatatctggagccaactttgcaagtaagtagaatacattctgaattttatttgaatctcaagaattaaaatattactttgaaaatcatttgtcacaaactgtcagaataattaagaaactacttagagcaaagaatgaggaaacatagcttgaaagttagatcccttccctaataaaaaaagctacttagctttatacccaaactaaggcattgcagaagaaaatatttgcaatatcattatttagcattctgaataattaataaattgggctgttttcttttggcaggatgggaagcacaaaatgcaagaggaaaatgttaaactaaaaaagcccctggaagaaagccacaggtgtttgttaatcaagtattaactaagatgtaaagttattctggggtggtgggaaggagggagttctttatatacattggcattgacaccgaccagacactgacttataatattaatatgccaggaagacatttgaagtggaagttaataataaaacgtataacatgtattaaaccaaacccattaggccatttcagaggaaagaaggatgatcaggctgtcctctcttccctgattaattcccaagctcagattatcacttaagaggttatttcccacctttactgaattggtatcccaggaaaataaagtataagtcatacatagcatttcttaacttcttaaatatatttgagtatgacttgtttctacctctgtgctaaatttcaaataagtggctgggcgcagtggctcacgcctgtaatcccagtactttgggaggccgaggcaggtggatcacctgagattagaagttcgagaccagcctgccaacatggtgaaacccggtctctactaacgatacaaaattagtcgggtctggtggtacctgcctgtaatcccaactacttgggaggccgaggcaggagaatcacttgaactcaggaggcagaggttgcagtgagccaagatagcgccactgcactccagcctgggcaatacagtgagactctgtctcaaataaaaaaaaaagttcaaataagtactctgatttctcttatgtctcatctctcatttttcctttatcttgagaatctcaaacagcttaacttcattcctttatcctaactctgtctgatttgctcatgatgaagagcataggatagtttcaaggaagctgactttttatagttattttagcaggttagaaatataattaaatattacatagtgccactgcattaaaaagtgaaggaggtccagttacatgacattctggaaaagacaaaactatggagacaaaaaaaaaaaaaaaaaatcagtggttgccagtggtaagagaaggaaggaacgaaccggtggagcacagaggatttttagggcagtggactactctgtatgatactatgatggtggatacatgtcattatacatttgaccacactatagactagacaccaccaagagtgaaccttaatgtaaactatagactctgggtgatgatgttgtgtcagtgtaggctcatcagttgtaacaaatgtaccactctggtgcagcatgttgacaaagaggccagggatggggcaggaagcatgtgggaagtctctgtactttctactcaatttgactgtgaacctaactgctctaaacataaaggtctactttaaaaggtggaggaagaggttagtgatgaggaatgataccacagtgaggttttgagagaactatacagctgtccctagccaggcttcgtcaccttaagaatgaggtagtgtgtcatctggagcaaaagtagctgctggagaagagaaaacacacagtccaatagtaagctaattatgcaggtgcttggcctaaatgtccctttctggccttgctcccaaagagcatggtttgatccagagctaactttaaactatcacccatctcacattacagaatggcataagcaaagagaagggaactagaagggccataaaattaacctgggcttccaggtgcctttcagggtcagcctcgttccaaactaaaatcaaatcatttacttgagcaaccaggagtgtcttaaatgccaacttctgatttaggtcctgagaatatggaacagtgcttccttatatctgaattgtgctctgcaacttagaatttgtttcacatttattatctccttatgattcagtattccttacaaaagtacctaatgcaactttacagatgagaaaactgagaagcagagaggctgggtgacttatccaagttgcctctgtttatcatgtctactgtttttaagtcctttggctctgcactacctattagcaacttccaggacttattctggccatagctgcaatcgttagacataccaggcttcctgggattatgatggcaaggaacatcggaaaacctggtcaccccatggtgtatgtctggtggtcacactgctactcaagtgaaaagaataagaaccattgcaatctgtagtgcattttccctgtaaccgagagcgggctttgcttcacctctcatttaggctctagtccatgctggaacatcggagttagctcagcttagtccctcatgaagaaatatttcaacctgaatgggttttctggtgacagtctcattcatttccccttcttgggttaatttgctaaagctcacatcttaagaatatttgggactgatacacaacatgtgataatggataatggatagatttccataatatcaaatagaaaaaaagctactaaaatatatggccagtgaaccattggagttttacacattgggaaacataaatgctaactattttgatagcaaaaaggaatgtaaaatataacttcaaatctatttttaaatgggaacccttatataataagtcaagggtcagattctagtgattcattttaagaagcaaagtttcctctccttggaggtcaaaattaataattatgttgttctaagtaatataaaagacctacagtatttcttgtttgaaaaaaatgtttgtattctgagctttttattgaaatgatataaatgaaaatacatgaagttcctatttgtcacaattttttacttctccattgtaggctgcaaccccaccctatggatgaacaggtaacagagcctcctgtttcaaaacatcttgtatgaattatgaagttggttgtaccgtgcctagccagcaaataaggtagcatgggcggaagatgagtgaatacagtgtgccatccttctaacaataccctgaacaaatatgtattgcctgaagctcacacaggaagtagcacagctttgagcagtttactaagtaaacatcagttctcacctattttaaattatccctgacataagatctaggagagctcactttatgtccctttcctctagtttttccttacataaaatggagagaaaaaagatgttttgatcacttagaaataagctaacataaatgattgtaaaacactttgttaatctaatagtatatgataagcccatgagaaagacagtgaatgctactgtgtctgagtcaccctgtcatttacctcttaggttataaaataaaataagtcctactgctttcctttttttttttttaaatggagataaggtcttactcacattgcccaagctggggtgcagtggacgatctcagctcactgaagcctcaacttcccgagcttaggcagtcctcccacttctgcctcccgagtagctagggctgcagagattaggtttcaccgtgttgcccaggctggtctcaaactcctgggctcaagtgatcttcccgccttggcctcccaaagtgctgggattacaggtgtgagcttccatgccctatgcttgccattctttttttccttttttttttgagacagagtctcactctgtcacccagggtggagtgttgtggcacaatctcagctcactgcaacctccgcctcccaggttcaagtgattcccctgcctcagcctcccgagtagctgggattacaggcgcccaccaccatgtccaactttttttttttttaatatatatatttttggtagagatggagttttgccatgttggccaggctggtcttgaactcctgacctcaagtgatctacctgccttggcctcccaaagtgctggcattacaggcgtgagccaccaggcccagtccccagtgctttccattcttgatggtagagtgaacaagaggaatgggatagtgttaaaactttttactctatacttgcatgtgtttgaattttctttttagaaatcatgttattataaaaattaagagctggaagcataatgataggattatccgagttgtattatggtggtaggactacctatttataattggtttagtttccagatagtctatagtgtgattatattaatattgtaggtaaaaaatgcatattctgaaagtactaatatttctggcactaagaaaaactaaccagctccctgtgtggtttaggatcagctgctgctctctgaaaagccacagttgtgtcagctatgccaggaagacggcagcctaacaaaggtaactgtgatgagaaacggacaggcttttcatagggatgtctacagcagcccccagtccctccccaggagtaacagggactttcccgcatagagtgcagagtgcatgcagagtgctgggagtggggtgaaaagcaaaaggggcaagcatttactgggtacctgttttttcagtcataataattcatgtcagaaaattcccattaaaataaacataaatagccaggcgcggtgactcacgcctgtaatcccagcattttgggaggccgaggcgggccgatcacaaggtcaggagttcaagaccagcctgatcaacatggtaaaaccccgtctgtactaaaaatacaaaaaaaaaaaaaaaaaaaaatagccgggcgtggtggcctgtaatcccagctactcaggttgctgaggcaggagaatcgcttgaacccgggaggcggaggttgcagtgagccaagatcacaccattgcactccagcctgggcaacagagcgagactctgtctaaaaataagtaaataaataaacaaacaaaaataattatgtaataaagcaaataagcagatagaaatgtataagtaaatattgagtgcctgctgtgtagaatgtgctggagaaagagtaatgaacaaagtagaccaagtctctgttcttgtcaagcttatgtccttcatagctgtcattttatagatgaagaacgttgaacatctaatgctaactacatttcccaaaattaagtcataagtgatgaagcccagcttccaacctagctttcgctccaaagtccacagtcctttcagcactttatcctgctcagaacaggatatgagctctccctgctagaccacttgttttccacccgatcctcaagggtgcctgcctgagcatcttcccagtttgttatcctagagtaggcagagttaaggaagtattcagaaagaatgagtgcccttgatagctggaactgtgtcttgttcacagaatcccccagcatctaatatggtacccaatccatagtagatcctcaagaaaagttatgtacaaatgagtgtatgaaacacatgcttggaagagatacaggaaacaggctcaaattctggatcacaacctgcatagcaccatctgtgatcatgcaaaattttaataaattataatatgacctagtcttaaattcacagaatcagataacaaatgaactgcccttatagaactggaagttacaattatagaaatatgttacaaagtagaacaaactgttaattctggctttcctcttctaagccatgcaatattagcttctgtatgtcagacaaaaattcttcttaggctttcagataaaagcaaccccctactcctctcaacctcaggaagatgaattatttgggatgaaggtagcacttcatgggagaaattattctttacagctttttatataggacccttggagctttgtgtataccaccctatcacagccttactgctgacattgctatagtgacttcttgctctctgtgcttgaccattaaagatgcaaaacatttaggaaaacaaaataatttccctatgaacaagatgcaggaagctgtgctcctgctgcattgataacccagtggatgtgcttacagagcaccagagaccacaggaaagcataaagcacatcagtgtatttattaggaattatactttcagttcatactctggacatttttaaatcttagcctgttcactcaatccattgctctttcactgccttatttggagtatgcgcaggtacttgcaaactaattttaaaactaacctacctcaaagtgagtatggggaacagatgtgtgaaggatattctaaagataagtgacttgtatgttacctgtttttatttttaactctatggcactgcttcttttcatttaaatctaaaaactagacggtgaacttttttgtagattgggcctgtgttcagatactacctggcacatagtaaacattcagtcattgtttgattaggcattgagcatttgccatatttggctttttatatcccatgaatccttatgccttgctcatcttctattccccgcctaacctcctcttctcatagaatgtgtgtaagaactgcagcggaaccttctgtgatgcctgttcaacaaatgaactgcctcttccttcaagtatcaagcttgagcgagtttgcaatccctgtcacaagcatctgatgaagcaatattctaccagcccatcataagactggaggccaagacctggaccaaaacgtttatgcaggctcctctgtacctgtgttttagctgtcaggatctcatagagcccagttct

SEQ ID NO: 13890 - DNA, 866 bp, Homo sapiens
tggcgtgtgcctgtaatcccagctactctggaggctgaggcacaagaatcacttgaatccaagtggatcacttaaggtgaagagttcgagaccagcctggccaacatggtgaaacctcgtctctagtaaaaatacaaaaataagccaggcacggtgatgcacgcctataatcccagctactcaggaggctgagacacaagaatcgcttgaacccgggaggcagaggctgcagtgagacgagatggcaccagtgcactccagcctgggcgacagagcgagactctgtctccaaaaagaaagaaaaatattgtggcactggggcatcaacttgattgaacgtccagaggattatagtctgctgtatatggccatccttggttttaccagtttttcagagctcagtctggggaaaagaaaaaaaaaattatacttcccctaagaagtaactgatatctggagccaactttgcaagatgggaagcacaaaatgcaagaggaaaatgttaaactaaaaaagcccctggaagaaagccacaggctgcaaccccaccctatggatgaacaggatcagctgctgctctctgaaaagccacagttgtgtcagctatgccaggaagacggcagcctaacaaagaatgtgtgtaagaactgcagcggaaccttctgtgatgcctgttcaacaaatgaactgcctcttccttcaagtatcaagcttgagcgagtttgcaatccctgtcacaagcatctgatgaagcaatattctaccagcccatcataagactggaggccaagacctggaccaaaacgtttatgcaggctcctctgtacctgtgttttagctgtcaggatctcatagagcccagttct

SEQ ID NO: 13891 - DNA, 3812 bp, Homo sapiens
ggtaacagagcctcctgtttcaaaacatcttgtatgaattatgaagttggttgtaccgtgcctagccagcaaataaggtagcatgggcggaagatgagtgaatacagtgtgccatccttctaacaataccctgaacaaatatgtattgcctgaagctcacacaggaagtagcacagctttgagcagtttactaagtaaacatcagttctcacctattttaaattatccctgacataagatctaggagagctcactttatgtccctttcctctagtttttccttacataaaatggagagaaaaaagatgttttgatcacttagaaataagctaacataaatgattgtaaaacactttgttaatctaatagtatatgataagcccatgagaaagacagtgaatgctactgtgtctgagtcaccctgtcatttacctcttaggttataaaataaaataagtcctactgctttcctttttttttttttaaatggagataaggtcttactcacattgcccaagctggggtgcagtggacgatctcagctcactgaagcctcaacttcccgagcttaggcagtcctcccacttctgcctcccgagtagctagggctgcagagattaggtttcaccgtgttgcccaggctggtctcaaactcctgggctcaagtgatcttcccgccttggcctcccaaagtgctgggattacaggtgtgagcttccatgccctatgcttgccattctttttttccttttttttttgagacagagtctcactctgtcacccagggtggagtgttgtggcacaatctcagctcactgcaacctccgcctcccaggttcaagtgattcccctgcctcagcctcccgagtagctgggattacaggcgcccaccaccatgtccaactttttttttttttaatatatatatttttggtagagatggagttttgccatgttggccaggctggtcttgaactcctgacctcaagtgatctacctgccttggcctcccaaagtgctggcattacaggcgtgagccaccaggcccagtccccagtgctttccattcttgatggtagagtgaacaagaggaatgggatagtgttaaaactttttactctatacttgcatgtgtttgaattttctttttagaaatcatgttattataaaaattaagagctggaagcataatgataggattatccgagttgtattatggtggtaggactacctatttataattggtttagtttccagatagtctatagtgtgattatattaatattgtaggtaaaaaatgcatattctgaaagtactaatatttctggcactaagaaaaactaaccagctccctgtgtggtttaggatcagctgctgctctctgaaaagccacagttgtgtcagctatgccaggaagacggcagcctaacaaaggtaactgtgatgagaaacggacaggcttttcatagggatgtctacagcagcccccagtccctccccaggagtaacagggactttcccgcatagagtgcagagtgcatgcagagtgctgggagtggggtgaaaagcaaaaggggcaagcatttactgggtacctgttttttcagtcataataattcatgtcagaaaattcccattaaaataaacataaatagccaggcgcggtgactcacgcctgtaatcccagcattttgggaggccgaggcgggccgatcacaaggtcaggagttcaagaccagcctgatcaacatggtaaaaccccgtctgtactaaaaatacaaaaaaaaaaaaaaaaaaaaatagccgggcgtggtggcctgtaatcccagctactcaggttgctgaggcaggagaatcgcttgaacccgggaggcggaggttgcagtgagccaagatcacaccattgcactccagcctgggcaacagagcgagactctgtctaaaaataagtaaataaataaacaaacaaaaataattatgtaataaagcaaataagcagatagaaatgtataagtaaatattgagtgcctgctgtgtagaatgtgctggagaaagagtaatgaacaaagtagaccaagtctctgttcttgtcaagcttatgtccttcatagctgtcattttatagatgaagaacgttgaacatctaatgctaactacatttcccaaaattaagtcataagtgatgaagcccagcttccaacctagctttcgctccaaagtccacagtcctttcagcactttatcctgctcagaacaggatatgagctctccctgctagaccacttgttttccacccgatcctcaagggtgcctgcctgagcatcttcccagtttgttatcctagagtaggcagagttaaggaagtattcagaaagaatgagtgcccttgatagctggaactgtgtcttgttcacagaatcccccagcatctaatatggtacccaatccatagtagatcctcaagaaaagttatgtacaaatgagtgtatgaaacacatgcttggaagagatacaggaaacaggctcaaattctggatcacaacctgcatagcaccatctgtgatcatgcaaaattttaataaattataatatgacctagtcttaaattcacagaatcagataacaaatgaactgcccttatagaactggaagttacaattatagaaatatgttacaaagtagaacaaactgttaattctggctttcctcttctaagccatgcaatattagcttctgtatgtcagacaaaaattcttcttaggctttcagataaaagcaaccccctactcctctcaacctcaggaagatgaattatttgggatgaaggtagcacttcatgggagaaattattctttacagctttttatataggacccttggagctttgtgtataccaccctatcacagccttactgctgacattgctatagtgacttcttgctctctgtgcttgaccattaaagatgcaaaacatttaggaaaacaaaataatttccctatgaacaagatgcaggaagctgtgctcctgctgcattgataacccagtggatgtgcttacagagcaccagagaccacaggaaagcataaagcacatcagtgtatttattaggaattatactttcagttcatactctggacatttttaaatcttagcctgttcactcaatccattgctctttcactgccttatttggagtatgcgcaggtacttgcaaactaattttaaaactaacctacctcaaagtgagtatggggaacagatgtgtgaaggatattctaaagataagtgacttgtatgttacctgtttttatttttaactctatggcactgcttcttttcatttaaatctaaaaactagacggtgaacttttttgtagattgggcctgtgttcagatactacctggcacatagtaaacattcagtcattgtttgattaggcattgagcatttgccatatttggctttttatatcccatgaatccttatgccttgctcatcttctattccccgcctaacctcctcttctcatagaatgtgtgtaagaactgcagcggaaccttctgtgatgcctgttcaacaaatgaactgcctcttccttcaagtatcaagcttgagcgagtttgcaatccctgtcacaagcatctgatgaagcaatattctaccagcccatcataagactggaggccaagacctggaccaaaacgtttatgcaggctcctctgtacctgtgttttagctgtcaggatctcatagagcccagttcttagagtcaactaaagagttgataggaatttactaggtccagggaga

SEQ ID NO: 13892 - DNA, 356 bp, Homo sapiens
ggtaacagagcctcctgtttcaaaacatcttgtatgaattatgaagttggttgtaccgtgcctagccagcaaataagaatgtgtgtaagaactgcagcggaaccttctgtgatgcctgttcaacaaatgaactgcctcttccttcaagtatcaagcttgagcgagtttgcaatccctgtcacaagcatctgatgaagcaatattctaccagcccatcataagactggaggccaagacctggaccaaaacgtttatgcaggctcctctgtacctgtgttttagctgtcaggatctcatagagcccagttcttagagtcaactaaagagttgataggaatttactaggtccagggaga

SEQ ID NO: 13893 - DNA, 867 bp, Homo sapiens
gtaattggcccttggtgagattacagaaacatttgttgccaccagtgcagtcagccttagatttacactgtcaggttctctgagctgtgattatgtgttcagaaggcagtctcagtgaacttctcaaagtgagaaggttgtagcttttaatacagtctcagaagcctatgggacaaagttttctggacacggttcatcccttcttgttgctctgccctgaaaataacctggctagtcaccctttcaagatcctaattatctcatggctaatgaacgcatgaacctcatgaacatggccaagctgagtatcaagggcttgattgaatcagctctgaacctggggaggactcttgactctgactatgcacctctccagcaattctttgtggtgatggagcactgtctgaaacatggcttgaaagctaaaaaaacttttctcggacaaaataaatccttctgggggcctctagaactggtagaaaagcttgttccagaagccgcagagataacagcaagtgttaaagatcttccaggacttaagacaccagtaggtagaggaagagcctggcttcgtttggcattaatgcaaaagaaactttcagaatatatgaaagctttgatcaataagaaagaacttctcagtgaattctacgaacccaatgccctcatgatggaagaagaaggagccataattgctggtctgttggtgggtctgaatgtcattgatgccaatttctgtatgaaaggagaagacttggactctcaggttggagttatagatttttcaatgtatctcaaggacgggaacagcagtaaaggtactgaaggagacggtcagattactgcaattctggaccagaagaacta

SEQ ID NO: 13894 - DNA, 1027 bp, Homo sapiens
aaatacaggatttcagtacagcgcacaagacgggaacaaaagaggtggtggaaggaagacacccacctttggtttctcacataaagagctcaatactccaaacagtgaatcaacggttgaagttgcagtgtgtgaaaggcaaatggtacagtttaatacccgggggcagggaggtgcttttttaaaattagctttcgcctcttcttcaacccagatctttgtgccttcgtgctaccgataaagttggcggttacacgacaaaacgccgccaggtatttcgccaggtcttccacttttcaagcactagacacacctgaccgccttacagggcccagcgggggcgggtaaggaagaggcccagggcccgagggtcgggaggcagtcagcccagccggagggaagcggaaggtggggagtgggaagaggaggacgctgccccctaggggagccgagtcacaggctgggggccggggcgggaggggctggaggaggcggccggtagcgaggccgcgccgtcgggcggggcggtccctccagctggcttggaccctggcggggcgggctgtgggccgagcggcggagcccaggcgccagcccgtggccgagaagaaaggtggcggtggcggcggcggcgcagcggacgggacggggcggcggctcctcgccctgaccctctgctcccccgcccaggcccgggcgcgaatcggaggctgcggcgaaggaaggagtgagcatggctgagaccccgccgccgcccaccgctggtgccgaaagttgcagcgaggagccggcgaggggcggggagtggcggccggaggagccgcgccgcgctcccgccgggggcacggaccgagagggcgaggcggggccgccgccggcctcccccgccgggcagtcggagcccgactcgccggtggccgcccccttcttcctgctgtaccccggcgatggaggcgccggcttcggagtgcgcccgccgccgcagcagcagcgctcctggaggaccccgccgtcccccggctcaccg

SEQ ID NO: 13895 - DNA, 482 bp, Homo sapiens
aaatacaggatttcagtacagcgcacaagacgggaacaaaagaggtggtggaaggaagacacccacctttggtttctcacataaagagctcaatactccaaacagtgaatcaacggttgaagttgcagtgtgtgaaaggcaaatggcccgggcgcgaatcggaggctgcggcgaaggaaggagtgagcatggctgagaccccgccgccgcccaccgctggtgccgaaagttgcagcgaggagccggcgaggggcggggagtggcggccggaggagccgcgccgcgctcccgccgggggcacggaccgagagggcgaggcggggccgccgccggcctcccccgccgggcagtcggagcccgactcgccggtggccgcccccttcttcctgctgtaccccggcgatggaggcgccggcttcggagtgcgcccgccgccgcagcagcagcgctcctggaggaccccgccgtcccccggctcaccg

SEQ ID NO: 13896 - DNA, 3726 bp, Homo sapiens
tgtattctgagctttttattgaaatgatataaatgaaaatacatgaagttcctatttgtcacaattttttacttctccattgtaggctgcaaccccaccctatggatgaacaggtaacagagcctcctgtttcaaaacatcttgtatgaattatgaagttggttgtaccgtgcctagccagcaaataaggtagcatgggcggaagatgagtgaatacagtgtgccatccttctaacaataccctgaacaaatatgtattgcctgaagctcacacaggaagtagcacagctttgagcagtttactaagtaaacatcagttctcacctattttaaattatccctgacataagatctaggagagctcactttatgtccctttcctctagtttttccttacataaaatggagagaaaaaagatgttttgatcacttagaaataagctaacataaatgattgtaaaacactttgttaatctaatagtatatgataagcccatgagaaagacagtgaatgctactgtgtctgagtcaccctgtcatttacctcttaggttataaaataaaataagtcctactgctttcctttttttttttttaaatggagataaggtcttactcacattgcccaagctggggtgcagtggacgatctcagctcactgaagcctcaacttcccgagcttaggcagtcctcccacttctgcctcccgagtagctagggctgcagagattaggtttcaccgtgttgcccaggctggtctcaaactcctgggctcaagtgatcttcccgccttggcctcccaaagtgctgggattacaggtgtgagcttccatgccctatgcttgccattctttttttccttttttttttgagacagagtctcactctgtcacccagggtggagtgttgtggcacaatctcagctcactgcaacctccgcctcccaggttcaagtgattcccctgcctcagcctcccgagtagctgggattacaggcgcccaccaccatgtccaactttttttttttttaatatatatatttttggtagagatggagttttgccatgttggccaggctggtcttgaactcctgacctcaagtgatctacctgccttggcctcccaaagtgctggcattacaggcgtgagccaccaggcccagtccccagtgctttccattcttgatggtagagtgaacaagaggaatgggatagtgttaaaactttttactctatacttgcatgtgtttgaattttctttttagaaatcatgttattataaaaattaagagctggaagcataatgataggattatccgagttgtattatggtggtaggactacctatttataattggtttagtttccagatagtctatagtgtgattatattaatattgtaggtaaaaaatgcatattctgaaagtactaatatttctggcactaagaaaaactaaccagctccctgtgtggtttaggatcagctgctgctctctgaaaagccacagttgtgtcagctatgccaggaagacggcagcctaacaaaggtaactgtgatgagaaacggacaggcttttcatagggatgtctacagcagcccccagtccctccccaggagtaacagggactttcccgcatagagtgcagagtgcatgcagagtgctgggagtggggtgaaaagcaaaaggggcaagcatttactgggtacctgttttttcagtcataataattcatgtcagaaaattcccattaaaataaacataaatagccaggcgcggtgactcacgcctgtaatcccagcattttgggaggccgaggcgggccgatcacaaggtcaggagttcaagaccagcctgatcaacatggtaaaaccccgtctgtactaaaaatacaaaaaaaaaaaaaaaaaaaaatagccgggcgtggtggcctgtaatcccagctactcaggttgctgaggcaggagaatcgcttgaacccgggaggcggaggttgcagtgagccaagatcacaccattgcactccagcctgggcaacagagcgagactctgtctaaaaataagtaaataaataaacaaacaaaaataattatgtaataaagcaaataagcagatagaaatgtataagtaaatattgagtgcctgctgtgtagaatgtgctggagaaagagtaatgaacaaagtagaccaagtctctgttcttgtcaagcttatgtccttcatagctgtcattttatagatgaagaacgttgaacatctaatgctaactacatttcccaaaattaagtcataagtgatgaagcccagcttccaacctagctttcgctccaaagtccacagtcctttcagcactttatcctgctcagaacaggatatgagctctccctgctagaccacttgttttccacccgatcctcaagggtgcctgcctgagcatcttcccagtttgttatcctagagtaggcagagttaaggaagtattcagaaagaatgagtgcccttgatagctggaactgtgtcttgttcacagaatcccccagcatctaatatggtacccaatccatagtagatcctcaagaaaagttatgtacaaatgagtgtatgaaacacatgcttggaagagatacaggaaacaggctcaaattctggatcacaacctgcatagcaccatctgtgatcatgcaaaattttaataaattataatatgacctagtcttaaattcacagaatcagataacaaatgaactgcccttatagaactggaagttacaattatagaaatatgttacaaagtagaacaaactgttaattctggctttcctcttctaagccatgcaatattagcttctgtatgtcagacaaaaattcttcttaggctttcagataaaagcaaccccctactcctctcaacctcaggaagatgaattatttgggatgaaggtagcacttcatgggagaaattattctttacagctttttatataggacccttggagctttgtgtataccaccctatcacagccttactgctgacattgctatagtgacttcttgctctctgtgcttgaccattaaagatgcaaaacatttaggaaaacaaaataatttccctatgaacaagatgcaggaagctgtgctcctgctgcattgataacccagtggatgtgcttacagagcaccagagaccacaggaaagcataaagcacatcagtgtatttattaggaattatactttcagttcatactctggacatttttaaatcttagcctgttcactcaatccattgctctttcactgccttatttggagtatgcgcaggtacttgcaaactaattttaaaactaacctacctcaaagtgagtatggggaacagatgtgtgaaggatattctaaagataagtgacttgtatgttacctgtttttatttttaactctatggcactgcttcttttcatttaaatctaaaaactagacggtgaacttttttgtagattgggcctgtgttcagatactacctggcacatagtaaacattcagtcattgtttgattaggcattgagcatttgccatatttggctttttatatcccatgaatccttatgccttgctcatcttctattccccgcctaacctcctcttctcatagaatgtgtgtaagaactgcagcggaaccttctgtgatgcctgttcaacaaatgaactgcctcttccttcaagtatcaagctt

SEQ ID NO: 13897 - DNA, 456 bp, Homo sapiens
tgtattctgagctttttattgaaatgatataaatgaaaatacatgaagttcctatttgtcacaattttttacttctccattgtaggctgcaaccccaccctatggatgaacaggtaacagagcctcctgtttcaaaacatcttgtatgaattatgaagttggttgtaccgtgcctagccagcaaataaggtagcatgggcggaagatgagtgaatacagtgtgccatccttctaacaataccctgaacaaatatgtattgcctgaagctcacacaggaagtagcacagctttgagcagtttactaagatcagctgctgctctctgaaaagccacagttgtgtcagctatgccaggaagacggcagcctaacaaagaatgtgtgtaagaactgcagcggaaccttctgtgatgcctgttcaacaaatgaactgcctcttccttcaagtatcaagctt

SEQ ID NO: 13898 - DNA, 7106 bp, Homo sapiens
aagaatcacttgaatccaagtggatcacttaaggtgaagagttcgagaccagcctggccaacatggtgaaacctcgtctctagtaaaaatacaaaaataagccaggcacggtgatgcacgcctataatcccagctactcaggaggctgagacacaagaatcgcttgaacccgggaggcagaggctgcagtgagacgagatggcaccagtgcactccagcctgggcgacagagcgagactctgtctccaaaaagaaagaaaaatattgtggcactggggcatcaacttgattgaacgtccagaggattatagtctgctgtatatggccatccttggttttaccagtttttcagagctcagtctggggaaaagaaaaaaaaaattatacttcccctaagaagtaactgatatctggagccaactttgcaagtaagtagaatacattctgaattttatttgaatctcaagaattaaaatattactttgaaaatcatttgtcacaaactgtcagaataattaagaaactacttagagcaaagaatgaggaaacatagcttgaaagttagatcccttccctaataaaaaaagctacttagctttatacccaaactaaggcattgcagaagaaaatatttgcaatatcattatttagcattctgaataattaataaattgggctgttttcttttggcaggatgggaagcacaaaatgcaagaggaaaatgttaaactaaaaaagcccctggaagaaagccacaggtgtttgttaatcaagtattaactaagatgtaaagttattctggggtggtgggaaggagggagttctttatatacattggcattgacaccgaccagacactgacttataatattaatatgccaggaagacatttgaagtggaagttaataataaaacgtataacatgtattaaaccaaacccattaggccatttcagaggaaagaaggatgatcaggctgtcctctcttccctgattaattcccaagctcagattatcacttaagaggttatttcccacctttactgaattggtatcccaggaaaataaagtataagtcatacatagcatttcttaacttcttaaatatatttgagtatgacttgtttctacctctgtgctaaatttcaaataagtggctgggcgcagtggctcacgcctgtaatcccagtactttgggaggccgaggcaggtggatcacctgagattagaagttcgagaccagcctgccaacatggtgaaacccggtctctactaacgatacaaaattagtcgggtctggtggtacctgcctgtaatcccaactacttgggaggccgaggcaggagaatcacttgaactcaggaggcagaggttgcagtgagccaagatagcgccactgcactccagcctgggcaatacagtgagactctgtctcaaataaaaaaaaaagttcaaataagtactctgatttctcttatgtctcatctctcatttttcctttatcttgagaatctcaaacagcttaacttcattcctttatcctaactctgtctgatttgctcatgatgaagagcataggatagtttcaaggaagctgactttttatagttattttagcaggttagaaatataattaaatattacatagtgccactgcattaaaaagtgaaggaggtccagttacatgacattctggaaaagacaaaactatggagacaaaaaaaaaaaaaaaaaatcagtggttgccagtggtaagagaaggaaggaacgaaccggtggagcacagaggatttttagggcagtggactactctgtatgatactatgatggtggatacatgtcattatacatttgaccacactatagactagacaccaccaagagtgaaccttaatgtaaactatagactctgggtgatgatgttgtgtcagtgtaggctcatcagttgtaacaaatgtaccactctggtgcagcatgttgacaaagaggccagggatggggcaggaagcatgtgggaagtctctgtactttctactcaatttgactgtgaacctaactgctctaaacataaaggtctactttaaaaggtggaggaagaggttagtgatgaggaatgataccacagtgaggttttgagagaactatacagctgtccctagccaggcttcgtcaccttaagaatgaggtagtgtgtcatctggagcaaaagtagctgctggagaagagaaaacacacagtccaatagtaagctaattatgcaggtgcttggcctaaatgtccctttctggccttgctcccaaagagcatggtttgatccagagctaactttaaactatcacccatctcacattacagaatggcataagcaaagagaagggaactagaagggccataaaattaacctgggcttccaggtgcctttcagggtcagcctcgttccaaactaaaatcaaatcatttacttgagcaaccaggagtgtcttaaatgccaacttctgatttaggtcctgagaatatggaacagtgcttccttatatctgaattgtgctctgcaacttagaatttgtttcacatttattatctccttatgattcagtattccttacaaaagtacctaatgcaactttacagatgagaaaactgagaagcagagaggctgggtgacttatccaagttgcctctgtttatcatgtctactgtttttaagtcctttggctctgcactacctattagcaacttccaggacttattctggccatagctgcaatcgttagacataccaggcttcctgggattatgatggcaaggaacatcggaaaacctggtcaccccatggtgtatgtctggtggtcacactgctactcaagtgaaaagaataagaaccattgcaatctgtagtgcattttccctgtaaccgagagcgggctttgcttcacctctcatttaggctctagtccatgctggaacatcggagttagctcagcttagtccctcatgaagaaatatttcaacctgaatgggttttctggtgacagtctcattcatttccccttcttgggttaatttgctaaagctcacatcttaagaatatttgggactgatacacaacatgtgataatggataatggatagatttccataatatcaaatagaaaaaaagctactaaaatatatggccagtgaaccattggagttttacacattgggaaacataaatgctaactattttgatagcaaaaaggaatgtaaaatataacttcaaatctatttttaaatgggaacccttatataataagtcaagggtcagattctagtgattcattttaagaagcaaagtttcctctccttggaggtcaaaattaataattatgttgttctaagtaatataaaagacctacagtatttcttgtttgaaaaaaatgtttgtattctgagctttttattgaaatgatataaatgaaaatacatgaagttcctatttgtcacaattttttacttctccattgtaggctgcaaccccaccctatggatgaacaggtaacagagcctcctgtttcaaaacatcttgtatgaattatgaagttggttgtaccgtgcctagccagcaaataaggtagcatgggcggaagatgagtgaatacagtgtgccatccttctaacaataccctgaacaaatatgtattgcctgaagctcacacaggaagtagcacagctttgagcagtttactaagtaaacatcagttctcacctattttaaattatccctgacataagatctaggagagctcactttatgtccctttcctctagtttttccttacataaaatggagagaaaaaagatgttttgatcacttagaaataagctaacataaatgattgtaaaacactttgttaatctaatagtatatgataagcccatgagaaagacagtgaatgctactgtgtctgagtcaccctgtcatttacctcttaggttataaaataaaataagtcctactgctttcctttttttttttttaaatggagataaggtcttactcacattgcccaagctggggtgcagtggacgatctcagctcactgaagcctcaacttcccgagcttaggcagtcctcccacttctgcctcccgagtagctagggctgcagagattaggtttcaccgtgttgcccaggctggtctcaaactcctgggctcaagtgatcttcccgccttggcctcccaaagtgctgggattacaggtgtgagcttccatgccctatgcttgccattctttttttccttttttttttgagacagagtctcactctgtcacccagggtggagtgttgtggcacaatctcagctcactgcaacctccgcctcccaggttcaagtgattcccctgcctcagcctcccgagtagctgggattacaggcgcccaccaccatgtccaactttttttttttttaatatatatatttttggtagagatggagttttgccatgttggccaggctggtcttgaactcctgacctcaagtgatctacctgccttggcctcccaaagtgctggcattacaggcgtgagccaccaggcccagtccccagtgctttccattcttgatggtagagtgaacaagaggaatgggatagtgttaaaactttttactctatacttgcatgtgtttgaattttctttttagaaatcatgttattataaaaattaagagctggaagcataatgataggattatccgagttgtattatggtggtaggactacctatttataattggtttagtttccagatagtctatagtgtgattatattaatattgtaggtaaaaaatgcatattctgaaagtactaatatttctggcactaagaaaaactaaccagctccctgtgtggtttaggatcagctgctgctctctgaaaagccacagttgtgtcagctatgccaggaagacggcagcctaacaaaggtaactgtgatgagaaacggacaggcttttcatagggatgtctacagcagcccccagtccctccccaggagtaacagggactttcccgcatagagtgcagagtgcatgcagagtgctgggagtggggtgaaaagcaaaaggggcaagcatttactgggtacctgttttttcagtcataataattcatgtcagaaaattcccattaaaataaacataaatagccaggcgcggtgactcacgcctgtaatcccagcattttgggaggccgaggcgggccgatcacaaggtcaggagttcaagaccagcctgatcaacatggtaaaaccccgtctgtactaaaaatacaaaaaaaaaaaaaaaaaaaaatagccgggcgtggtggcctgtaatcccagctactcaggttgctgaggcaggagaatcgcttgaacccgggaggcggaggttgcagtgagccaagatcacaccattgcactccagcctgggcaacagagcgagactctgtctaaaaataagtaaataaataaacaaacaaaaataattatgtaataaagcaaataagcagatagaaatgtataagtaaatattgagtgcctgctgtgtagaatgtgctggagaaagagtaatgaacaaagtagaccaagtctctgttcttgtcaagcttatgtccttcatagctgtcattttatagatgaagaacgttgaacatctaatgctaactacatttcccaaaattaagtcataagtgatgaagcccagcttccaacctagctttcgctccaaagtccacagtcctttcagcactttatcctgctcagaacaggatatgagctctccctgctagaccacttgttttccacccgatcctcaagggtgcctgcctgagcatcttcccagtttgttatcctagagtaggcagagttaaggaagtattcagaaagaatgagtgcccttgatagctggaactgtgtcttgttcacagaatcccccagcatctaatatggtacccaatccatagtagatcctcaagaaaagttatgtacaaatgagtgtatgaaacacatgcttggaagagatacaggaaacaggctcaaattctggatcacaacctgcatagcaccatctgtgatcatgcaaaattttaataaattataatatgacctagtcttaaattcacagaatcagataacaaatgaactgcccttatagaactggaagttacaattatagaaatatgttacaaagtagaacaaactgttaattctggctttcctcttctaagccatgcaatattagcttctgtatgtcagacaaaaattcttcttaggctttcagataaaagcaaccccctactcctctcaacctcaggaagatgaattatttgggatgaaggtagcacttcatgggagaaattattctttacagctttttatataggacccttggagctttgtgtataccaccctatcacagccttactgctgacattgctatagtgacttcttgctctctgtgcttgaccattaaagatgcaaaacatttaggaaaacaaaataatttccctatgaacaagatgcaggaagctgtgctcctgctgcattgataacccagtggatgtgcttacagagcaccagagaccacaggaaagcataaagcacatcagtgtatttattaggaattatactttcagttcatactctggacatttttaaatcttagcctgttcactcaatccattgctctttcactgccttatttggagtatgcgcaggtacttgcaaactaattttaaaactaacctacctcaaagtgagtatggggaacagatgtgtgaaggatattctaaagataagtgacttgtatgttacctgtttttatttttaactctatggcactgcttcttttcatttaaatctaaaaactagacggtgaacttttttgtagattgggcctgtgttcagatactacctggcacatagtaaacattcagtcattgtttgattaggcattgagcatttgccatatttggctttttatatcccatgaatccttatgccttgctcatcttctattccccgcctaacctcctcttctcatagaatgtgtgtaagaactgcagcggaaccttctgtgatgc

SEQ ID NO: 13899 - DNA, 893 bp, Homo sapiens
aagaatcacttgaatccaagtggatcacttaaggtgaagagttcgagaccagcctggccaacatggtgaaacctcgtctctagtaaaaatacaaaaataagccaggcacggtgatgcacgcctataatcccagctactcaggaggctgagacacaagaatcgcttgaacccgggaggcagaggctgcagtgagacgagatggcaccagtgcactccagcctgggcgacagagcgagactctgtctccaaaaagaaagaaaaatattgtggcactggggcatcaacttgattgaacgtccagaggattatagtctgctgtatatggccatccttggttttaccagtttttcagagctcagtctggggaaaagaaaaaaaaaattatacttcccctaagaagtaactgatatctggagccaactttgcaagtaagtagaatacattctgaattttatttgaatctcaagaattaaaatattactttgaaaatcatttgtcacaaactgtcagaataattaagaaactacttagagcaaagaatgaggaaacatagcttgaaagttagatcccttccctaataaaaaaagctacttagctttatacccaaactaaggcattgcagaagaaaatatttgcaatatcattatttagcattctgaataattaataaattgggctgttttcttttggcaggatgggaagcacaaaatgcaagaggaaaatgttaaactaaaaaagcccctggaagaaagccacaggctgcaaccccaccctatggatgaacaggatcagctgctgctctctgaaaagccacagttgtgtcagctatgccaggaagacggcagcctaacaaagaatgtgtgtaagaactgcagcggaaccttctgtgatgc

SEQ ID NO: 13900 - DNA, 1811 bp, Homo sapiens
tgctgatggaagctctccctgttcagtcccatctccacatcctttcctgggctgtgtctccaccctgtggatgctgcccaacccacactcttccagtccacactcttcacaacccaaacatgctgagggtagacgcctcaaaggcgaggagacactagccccagctgtccgggagcaccaatggtcattaccccttctcatccctgcagacgttggcacggtgctgaaggtgatctcggtccccaagggcagtaggcccagcgcagaggggctgctcctggaggagctgcacgtgtttgaggtgaggcctcacccccagtcgcccgggacccccccaccccactaagccctgaccccgtcgcccctcctccctctcaggactcggccgctgtcaccagcatgcaaatttcttccaagagggtgagtgaccaggatgggggtcggggtgggatggactgagcttgtgcctggcgcgtcccaagcctctggccccttttggtagtttgcagtcccgggtttgagtacaggctctggctttgttagactgtgtgacctgaggcgtaagacctcagtgttcccatctgtcgagtggaagaagggatccctgaccgatgggaggcaggcgtggggtcgccctcggtcagcccagagcccctcgtgccccctagcaccagctgtacgtagcctcgcggagcgcggtggcccagatcgcgttgcaccgctgcgctgcccacggccgcgtctgcaccgaatgctgtctggcgcgtgacccctactgcgcctgggacggggtcgcgtgcacgcgcttccagcccagtgccaagaggtgggcggggtcggggttgggccgccgggagggaggcgaagggtctttcactgcccggggctgaaagaagggctcacagaagatcggatgttccccacaggcggttccggcggcaagacgtaaggaatggcgaccccagcacgttgtgctccggaggtgagtgccccagctgcccctaccctcagccccagaagacgccccacctgccctgccttgcctaaatctgactttcttctcgccccaagactcgtctcgtcccgcgctgctggaacacaaggtgttcggcgtggagggcagcagcgcctttctggagtgtgagccccgctcgctgcaggcgcgcgtggagtggactttccagcgcgcaggggtgacagcccacacccaggtgagccttactccgccctccccgccaggctcctgtcccaccccctgcatccaggagaggccccgccctacccaacgaagccccgtccaaccagacccactccccgccctgtccagtttggtccctcacctgcactccacaagctgctgaggccccattgcgtccaacggggctcccgacccgcctcccctgaatcaaggagaagacccgccctcgaccctcccattaaggtccctgaccaccccccaccaagttcatgtaaaccccgcctctttcggattctcccttgaagaccaccagctcccaaacactcagccttaaaatgtgcgcctgcgggcacccctttcccgctccacctcggctcccaatgactctttgcttcttccgtcgcgtgctagggcccggaagccctgttcccggcccgacacccccgcctcacgctgccctctgcccgcaggtgctggcagaggagcgcaccgagcgcaccgcccggggactactgctgcgcaggctgcggcgccgggactcgggcgtgtacttgtgcgccgccgtcgagcagggctttacgcaaccgctgcgtcgcctgtcgctgcacgtgtt

SEQ ID NO: 13901 - DNA, 1088 bp, Homo sapiens
tgctgatggaagctctccctgttcagtcccatctccacatcctttcctgggctgtgtctccaccctgtggatgctgcccaacccacactcttccagtccacactcttcacaacccaaacatgctgagggtagacgcctcaaaggcgaggagacactagccccagctgtccgggagcaccaatggtcattaccccttctcatccctgcagacgttggcacggtgctgaaggtgatctcggtccccaagggcagtaggcccagcgcagaggggctgctcctggaggagctgcacgtgtttgaggactcggccgctgtcaccagcatgcaaatttcttccaagagggtgagtgaccaggatgggggtcggggtgggatggactgagcttgtgcctggcgcgtcccaagcctctggccccttttggtagtttgcagtcccgggtttgagtacaggctctggctttgttagactgtgtgacctgaggcgtaagacctcagtgttcccatctgtcgagtggaagaagggatccctgaccgatgggaggcaggcgtggggtcgccctcggtcagcccagagcccctcgtgccccctagcaccagctgtacgtagcctcgcggagcgcggtggcccagatcgcgttgcaccgctgcgctgcccacggccgcgtctgcaccgaatgctgtctggcgcgtgacccctactgcgcctgggacggggtcgcgtgcacgcgcttccagcccagtgccaagaggcggttccggcggcaagacgtaaggaatggcgaccccagcacgttgtgctccggagactcgtctcgtcccgcgctgctggaacacaaggtgttcggcgtggagggcagcagcgcctttctggagtgtgagccccgctcgctgcaggcgcgcgtggagtggactttccagcgcgcaggggtgacagcccacacccaggtgctggcagaggagcgcaccgagcgcaccgcccggggactactgctgcgcaggctgcggcgccgggactcgggcgtgtacttgtgcgccgccgtcgagcagggctttacgcaaccgctgcgtcgcctgtcgctgcacgtgtt

SEQ ID NO: 13902 - DNA, 3717 bp, Homo sapiens
atggtgctagaggttgggtggtcagacactgtgatcccgggtgctgtgcccgcactacgggaaggggaagcagcgcgtgggtctcgcatcaggaggcaaggccaggacccgctgacccatgcctcctgccgcggtcagagcccaagtttgtcaaggtattttggatcccggagagcgagaacccagacgacgacaaaatctacttcttctttcgtgagacggcggtagaggcggcgccggcactgggacgcctgtccgtgtcccgcgttggccagatctgccgggtgaggagtccctgggccacacccggcgaccctgcccctacccctttgcctgccctggtctcgccctcatcccctttgatcgtcccggcagaacgacgtgggcggccagcgcagcctggtcaacaagtggacgacgttcctgaaggcgcggctggtgtgctcggtgcccggcgtcgagggcgacacccacttcgatcagctccgtgagtgcgggagtgggtatggggttggggaggggggcagcggcgcagactccgggagcccccgccgcagcggggctgtgcgccctaccccagctaggccccttccccgcagaggatgtgtttctgttgtcctcgcgggaccaccggaccccgctgctctatgccgtcttctccacgtccaggtgaggggcaggaggtagggagcgcccggggcgggccgctgggctccacccggcccctcacctcgccctggtcttcgcctccagcagcatcttccagggctctgcggtgtgcgtgtacagcatgaacgacgtgcgccgggccttcttgggaccctttgcacacaaggaggggcccatgcaccagtgggtgtcataccagggtcgcgtcccctacccgcggccaggcatggttcgtagcccagggacttctgctacaacccacttcaaagcctcaagggtttgagaacttggcctggggtcttcttggtgaatgtggtttcttcctttagttatgggtgggaaaacgtttccatcataagacaaggcttgtttcccgcctctgacttcctagggcaaggctgatctcctctctaattctcagggcagggttctgtccccatccccctccatgttcccagaggctgggcatggagggctgcctatcaagcccccatatctatatccctgctgtgcctccctttcccccacccccagtgccccagcaagacctttggcaccttcagttccaccaaggacttcccagacgatgtcatccagtttgcgcggaaccaccccctcatgtacaactctgtcctgcccactggggggcgccctcttttcctacaagttggagccaattacaccttcactcaaattgccgcggaccgggttgcagccgctgacggacactatgacgtcctcttcattggcacaggtcagggtccctccacagcgacccccaggctcccagccaggccctgtgggctgctgatggaagctctccctgttcagtcccatctccacatcctttcctgggctgtgtctccaccctgtggatgctgcccaacccacactcttccagtccacactcttcacaacccaaacatgctgagggtagacgcctcaaaggcgaggagacactagccccagctgtccgggagcaccaatggtcattaccccttctcatccctgcagacgttggcacggtgctgaaggtgatctcggtccccaagggcagtaggcccagcgcagaggggctgctcctggaggagctgcacgtgtttgaggtgaggcctcacccccagtcgcccgggacccccccaccccactaagccctgaccccgtcgcccctcctccctctcaggactcggccgctgtcaccagcatgcaaatttcttccaagagggtgagtgaccaggatgggggtcggggtgggatggactgagcttgtgcctggcgcgtcccaagcctctggccccttttggtagtttgcagtcccgggtttgagtacaggctctggctttgttagactgtgtgacctgaggcgtaagacctcagtgttcccatctgtcgagtggaagaagggatccctgaccgatgggaggcaggcgtggggtcgccctcggtcagcccagagcccctcgtgccccctagcaccagctgtacgtagcctcgcggagcgcggtggcccagatcgcgttgcaccgctgcgctgcccacggccgcgtctgcaccgaatgctgtctggcgcgtgacccctactgcgcctgggacggggtcgcgtgcacgcgcttccagcccagtgccaagaggtgggcggggtcggggttgggccgccgggagggaggcgaagggtctttcactgcccggggctgaaagaagggctcacagaagatcggatgttccccacaggcggttccggcggcaagacgtaaggaatggcgaccccagcacgttgtgctccggaggtgagtgccccagctgcccctaccctcagccccagaagacgccccacctgccctgccttgcctaaatctgactttcttctcgccccaagactcgtctcgtcccgcgctgctggaacacaaggtgttcggcgtggagggcagcagcgcctttctggagtgtgagccccgctcgctgcaggcgcgcgtggagtggactttccagcgcgcaggggtgacagcccacacccaggtgagccttactccgccctccccgccaggctcctgtcccaccccctgcatccaggagaggccccgccctacccaacgaagccccgtccaaccagacccactccccgccctgtccagtttggtccctcacctgcactccacaagctgctgaggccccattgcgtccaacggggctcccgacccgcctcccctgaatcaaggagaagacccgccctcgaccctcccattaaggtccctgaccaccccccaccaagttcatgtaaaccccgcctctttcggattctcccttgaagaccaccagctcccaaacactcagccttaaaatgtgcgcctgcgggcacccctttcccgctccacctcggctcccaatgactctttgcttcttccgtcgcgtgctagggcccggaagccctgttcccggcccgacacccccgcctcacgctgccctctgcccgcaggtgctggcagaggagcgcaccgagcgcaccgcccggggactactgctgcgcaggctgcggcgccgggactcgggcgtgtacttgtgcgccgccgtcgagcagggctttacgcaaccgctgcgtcgcctgtcgctgcacgtgttgagtgctacgcaggccgaacgactggcgcgggccgaggaggctgcgcccgccgcgccgccgggccccaaactctggtaccgggactttctgcagctggtggagccgggcggaggtggcagcgcgaactccctgcgcatgtgccgcccgcagcctgcgctgcagtcactgcccctggagtcgcggagaaagggccgtaaccggaggacccacgcccctgagcctcgcgctgagcgggggccgcgcagcgcaacgcactggtgaccagactgtccccacgccgggaaccaagcaggagacgacaggcgagagaggagccagacagaccctgaaaagaaggacgggttggggccgggcacattgggggtcaccggccgatggagacaccaaccgacaggccctggctgagggcagctgcgcgggcttatttatta

SEQ ID NO: 13903 - DNA, 1765 bp, Homo sapiens
atggtgctagaggttgggtggtcagacactgtgatcccgggtgctgtgcccgcactacgggaaggggaagcagcgcgtgggtctcgcatcaggaggcaaggccaggacccgctgacccatgcctcctgccgcggtcagagcccaagtttgtcaagaacgacgtgggcggccagcgcagcctggtcaacaagtggacgacgttcctgaaggcgcggctggtgtgctcggtgcccggcgtcgagggcgacacccacttcgatcagctccaggatgtgtttctgttgtcctcgcgggaccaccggaccccgctgctctatgccgtcttctccacgtccagcagcatcttccagggctctgcggtgtgcgtgtacagcatgaacgacgtgcgccgggccttcttgggaccctttgcacacaaggaggggcccatgcaccagtgggtgtcataccagggtcgcgtcccctacccgcggccaggcatgtgccccagcaagacctttggcaccttcagttccaccaaggacttcccagacgatgtcatccagtttgcgcggaaccaccccctcatgtacaactctgtcctgcccactggggggcgccctcttttcctacaagttggagccaattacaccttcactcaaattgccgcggaccgggttgcagccgctgacggacactatgacgtcctcttcattggcacagacgttggcacggtgctgaaggtgatctcggtccccaagggcagtaggcccagcgcagaggggctgctcctggaggagctgcacgtgtttgaggactcggccgctgtcaccagcatgcaaatttcttccaagaggcaccagctgtacgtagcctcgcggagcgcggtggcccagatcgcgttgcaccgctgcgctgcccacggccgcgtctgcaccgaatgctgtctggcgcgtgacccctactgcgcctgggacggggtcgcgtgcacgcgcttccagcccagtgccaagaggcggttccggcggcaagacgtaaggaatggcgaccccagcacgttgtgctccggagactcgtctcgtcccgcgctgctggaacacaaggtgttcggcgtggagggcagcagcgcctttctggagtgtgagccccgctcgctgcaggcgcgcgtggagtggactttccagcgcgcaggggtgacagcccacacccaggtgctggcagaggagcgcaccgagcgcaccgcccggggactactgctgcgcaggctgcggcgccgggactcgggcgtgtacttgtgcgccgccgtcgagcagggctttacgcaaccgctgcgtcgcctgtcgctgcacgtgttgagtgctacgcaggccgaacgactggcgcgggccgaggaggctgcgcccgccgcgccgccgggccccaaactctggtaccgggactttctgcagctggtggagccgggcggaggtggcagcgcgaactccctgcgcatgtgccgcccgcagcctgcgctgcagtcactgcccctggagtcgcggagaaagggccgtaaccggaggacccacgcccctgagcctcgcgctgagcgggggccgcgcagcgcaacgcactggtgaccagactgtccccacgccgggaaccaagcaggagacgacaggcgagagaggagccagacagaccctgaaaagaaggacgggttggggccgggcacattgggggtcaccggccgatggagacaccaaccgacaggccctggctgagggcagctgcgcgggcttatttatta

SEQ ID NO: 13904 - DNA, 3816 bp, Homo sapiens
acgacgacaaaatctacttcttctttcgtgagacggcggtagaggcggcgccggcactgggacgcctgtccgtgtcccgcgttggccagatctgccgggtgaggagtccctgggccacacccggcgaccctgcccctacccctttgcctgccctggtctcgccctcatcccctttgatcgtcccggcagaacgacgtgggcggccagcgcagcctggtcaacaagtggacgacgttcctgaaggcgcggctggtgtgctcggtgcccggcgtcgagggcgacacccacttcgatcagctccgtgagtgcgggagtgggtatggggttggggaggggggcagcggcgcagactccgggagcccccgccgcagcggggctgtgcgccctaccccagctaggccccttccccgcagaggatgtgtttctgttgtcctcgcgggaccaccggaccccgctgctctatgccgtcttctccacgtccaggtgaggggcaggaggtagggagcgcccggggcgggccgctgggctccacccggcccctcacctcgccctggtcttcgcctccagcagcatcttccagggctctgcggtgtgcgtgtacagcatgaacgacgtgcgccgggccttcttgggaccctttgcacacaaggaggggcccatgcaccagtgggtgtcataccagggtcgcgtcccctacccgcggccaggcatggttcgtagcccagggacttctgctacaacccacttcaaagcctcaagggtttgagaacttggcctggggtcttcttggtgaatgtggtttcttcctttagttatgggtgggaaaacgtttccatcataagacaaggcttgtttcccgcctctgacttcctagggcaaggctgatctcctctctaattctcagggcagggttctgtccccatccccctccatgttcccagaggctgggcatggagggctgcctatcaagcccccatatctatatccctgctgtgcctccctttcccccacccccagtgccccagcaagacctttggcaccttcagttccaccaaggacttcccagacgatgtcatccagtttgcgcggaaccaccccctcatgtacaactctgtcctgcccactggggggcgccctcttttcctacaagttggagccaattacaccttcactcaaattgccgcggaccgggttgcagccgctgacggacactatgacgtcctcttcattggcacaggtcagggtccctccacagcgacccccaggctcccagccaggccctgtgggctgctgatggaagctctccctgttcagtcccatctccacatcctttcctgggctgtgtctccaccctgtggatgctgcccaacccacactcttccagtccacactcttcacaacccaaacatgctgagggtagacgcctcaaaggcgaggagacactagccccagctgtccgggagcaccaatggtcattaccccttctcatccctgcagacgttggcacggtgctgaaggtgatctcggtccccaagggcagtaggcccagcgcagaggggctgctcctggaggagctgcacgtgtttgaggtgaggcctcacccccagtcgcccgggacccccccaccccactaagccctgaccccgtcgcccctcctccctctcaggactcggccgctgtcaccagcatgcaaatttcttccaagagggtgagtgaccaggatgggggtcggggtgggatggactgagcttgtgcctggcgcgtcccaagcctctggccccttttggtagtttgcagtcccgggtttgagtacaggctctggctttgttagactgtgtgacctgaggcgtaagacctcagtgttcccatctgtcgagtggaagaagggatccctgaccgatgggaggcaggcgtggggtcgccctcggtcagcccagagcccctcgtgccccctagcaccagctgtacgtagcctcgcggagcgcggtggcccagatcgcgttgcaccgctgcgctgcccacggccgcgtctgcaccgaatgctgtctggcgcgtgacccctactgcgcctgggacggggtcgcgtgcacgcgcttccagcccagtgccaagaggtgggcggggtcggggttgggccgccgggagggaggcgaagggtctttcactgcccggggctgaaagaagggctcacagaagatcggatgttccccacaggcggttccggcggcaagacgtaaggaatggcgaccccagcacgttgtgctccggaggtgagtgccccagctgcccctaccctcagccccagaagacgccccacctgccctgccttgcctaaatctgactttcttctcgccccaagactcgtctcgtcccgcgctgctggaacacaaggtgttcggcgtggagggcagcagcgcctttctggagtgtgagccccgctcgctgcaggcgcgcgtggagtggactttccagcgcgcaggggtgacagcccacacccaggtgagccttactccgccctccccgccaggctcctgtcccaccccctgcatccaggagaggccccgccctacccaacgaagccccgtccaaccagacccactccccgccctgtccagtttggtccctcacctgcactccacaagctgctgaggccccattgcgtccaacggggctcccgacccgcctcccctgaatcaaggagaagacccgccctcgaccctcccattaaggtccctgaccaccccccaccaagttcatgtaaaccccgcctctttcggattctcccttgaagaccaccagctcccaaacactcagccttaaaatgtgcgcctgcgggcacccctttcccgctccacctcggctcccaatgactctttgcttcttccgtcgcgtgctagggcccggaagccctgttcccggcccgacacccccgcctcacgctgccctctgcccgcaggtgctggcagaggagcgcaccgagcgcaccgcccggggactactgctgcgcaggctgcggcgccgggactcgggcgtgtacttgtgcgccgccgtcgagcagggctttacgcaaccgctgcgtcgcctgtcgctgcacgtgttgagtgctacgcaggccgaacgactggcgcgggccgaggaggctgcgcccgccgcgccgccgggccccaaactctggtaccgggactttctgcagctggtggagccgggcggaggtggcagcgcgaactccctgcgcatgtgccgcccgcagcctgcgctgcagtcactgcccctggagtcgcggagaaagggccgtaaccggaggacccacgcccctgagcctcgcgctgagcgggggccgcgcagcgcaacgcactggtgaccagactgtccccacgccgggaaccaagcaggagacgacaggcgagagaggagccagacagaccctgaaaagaaggacgggttggggccgggcacattgggggtcaccggccgatggagacaccaaccgacaggccctggctgagggcagctgcgcgggcttatttattaacaggataacccttgaatgtagcagccccgggagggcggcacaggtcgggcgcaggattcagccggagggaagggacggggaagccgagctccagagcaacgaccagggccgaggaggtgcctggagtgcccaccctgggagacagaccccacctccttgggtagtgagcagtgagcagaaagctgtgaacaggctgggctgctggaggtggggcgaggcaggccgactgtactaaagtaacgcaataaacgcattatcagccaaagctggaatggccccagcag

SEQ ID NO: 13905 - DNA, 3283 bp, Homo sapiens
acgacgacaaaatctacttcttctttcgtgagacggcggtagaggcggcgccggcactgggacgcctgtccgtgtcccgcgttggccagatctgccgggtgaggagtccctgggccacacccggcgaccctgcccctacccctttgcctgccctggtctcgccctcatcccctttgatcgtcccggcagaacgacgtgggcggccagcgcagcctggtcaacaagtggacgacgttcctgaaggcgcggctggtgtgctcggtgcccggcgtcgagggcgacacccacttcgatcagctccgtgagtgcgggagtgggtatggggttggggaggggggcagcggcgcagactccgggagcccccgccgcagcggggctgtgcgccctaccccagctaggccccttccccgcagaggatgtgtttctgttgtcctcgcgggaccaccggaccccgctgctctatgccgtcttctccacgtccagcagcatcttccagggctctgcggtgtgcgtgtacagcatgaacgacgtgcgccgggccttcttgggaccctttgcacacaaggaggggcccatgcaccagtgggtgtcataccagggtcgcgtcccctacccgcggccaggcatggttcgtagcccagggacttctgctacaacccacttcaaagcctcaagggtttgagaacttggcctggggtcttcttggtgaatgtggtttcttcctttagttatgggtgggaaaacgtttccatcataagacaaggcttgtttcccgcctctgacttcctagggcaaggctgatctcctctctaattctcagggcagggttctgtccccatccccctccatgttcccagaggctgggcatggagggctgcctatcaagcccccatatctatatccctgctgtgcctccctttcccccacccccagtgccccagcaagacctttggcaccttcagttccaccaaggacttcccagacgatgtcatccagtttgcgcggaaccaccccctcatgtacaactctgtcctgcccactggggggcgccctcttttcctacaagttggagccaattacaccttcactcaaattgccgcggaccgggttgcagccgctgacggacactatgacgtcctcttcattggcacagacgttggcacggtgctgaaggtgatctcggtccccaagggcagtaggcccagcgcagaggggctgctcctggaggagctgcacgtgtttgaggtgaggcctcacccccagtcgcccgggacccccccaccccactaagccctgaccccgtcgcccctcctccctctcaggactcggccgctgtcaccagcatgcaaatttcttccaagagggtgagtgaccaggatgggggtcggggtgggatggactgagcttgtgcctggcgcgtcccaagcctctggccccttttggtagtttgcagtcccgggtttgagtacaggctctggctttgttagactgtgtgacctgaggcgtaagacctcagtgttcccatctgtcgagtggaagaagggatccctgaccgatgggaggcaggcgtggggtcgccctcggtcagcccagagcccctcgtgccccctagcaccagctgtacgtagcctcgcggagcgcggtggcccagatcgcgttgcaccgctgcgctgcccacggccgcgtctgcaccgaatgctgtctggcgcgtgacccctactgcgcctgggacggggtcgcgtgcacgcgcttccagcccagtgccaagaggcggttccggcggcaagacgtaaggaatggcgaccccagcacgttgtgctccggagactcgtctcgtcccgcgctgctggaacacaaggtgttcggcgtggagggcagcagcgcctttctggagtgtgagccccgctcgctgcaggcgcgcgtggagtggactttccagcgcgcaggggtgacagcccacacccaggtgagccttactccgccctccccgccaggctcctgtcccaccccctgcatccaggagaggccccgccctacccaacgaagccccgtccaaccagacccactccccgccctgtccagtttggtccctcacctgcactccacaagctgctgaggccccattgcgtccaacggggctcccgacccgcctcccctgaatcaaggagaagacccgccctcgaccctcccattaaggtccctgaccaccccccaccaagttcatgtaaaccccgcctctttcggattctcccttgaagaccaccagctcccaaacactcagccttaaaatgtgcgcctgcgggcacccctttcccgctccacctcggctcccaatgactctttgcttcttccgtcgcgtgctagggcccggaagccctgttcccggcccgacacccccgcctcacgctgccctctgcccgcaggtgctggcagaggagcgcaccgagcgcaccgcccggggactactgctgcgcaggctgcggcgccgggactcgggcgtgtacttgtgcgccgccgtcgagcagggctttacgcaaccgctgcgtcgcctgtcgctgcacgtgttgagtgctacgcaggccgaacgactggcgcgggccgaggaggctgcgcccgccgcgccgccgggccccaaactctggtaccgggactttctgcagctggtggagccgggcggaggtggcagcgcgaactccctgcgcatgtgccgcccgcagcctgcgctgcagtcactgcccctggagtcgcggagaaagggccgtaaccggaggacccacgcccctgagcctcgcgctgagcgggggccgcgcagcgcaacgcactggtgaccagactgtccccacgccgggaaccaagcaggagacgacaggcgagagaggagccagacagaccctgaaaagaaggacgggttggggccgggcacattgggggtcaccggccgatggagacaccaaccgacaggccctggctgagggcagctgcgcgggcttatttattaacaggataacccttgaatgtagcagccccgggagggcggcacaggtcgggcgcaggattcagccggagggaagggacggggaagccgagctccagagcaacgaccagggccgaggaggtgcctggagtgcccaccctgggagacagaccccacctccttgggtagtgagcagtgagcagaaagctgtgaacaggctgggctgctggaggtggggcgaggcaggccgactgtactaaagtaacgcaataaacgcattatcagccaaagctggaatggccccagcag

SEQ ID NO: 13906 - DNA, 7974 bp, Homo sapiens
gcagagtccagggcagctcaaggctcctccacacacacacccgctgaaccctgagcaccctgagctgctgagatggggcgggccggggctgccgccgtgatcccgggcctggccctgctctgggcagtggggctggggagtgccgcccccagccccccacgccttcggctctccttccaaggtaggtgcacctggcaggcgggagggcccagcttgaggtgggcaggaaagggtccccgtatggccagggggctctgtgttggctgttgccccatgtgcgtgcctgtcaccagactctggtaggattagtgggcactctcaggccacctccagttaaccctgtccgggcctcagcccccagcctctgcccacattctcttcgtgctttctcaggaagacccctcctgtccccacagcaacagaccttgtctctgttccgttcagtacccccaacaaggcgatactccttcagcagagcaacagggaagtcagagcccccttctcatgcctcctgtataggagggtggcccctgggcagtggcagtgaataggcagttctgctgagctcaggctggtggtggagtggcaggaaaggaactctcagcctgacttttgggagttggggttctggccatccctgcatgccagtctcccccaggactctggtgtccataagccttgcctcccagtgcgcccgcctggagacaccacctgtctgagcatgcccaagttcaacctgccttcctcttcctggggggatgtaccacctaccctggcagctccacacgtgcacctgggtgggcttgggtttgcgtgtgtaaactcacacacatgtaaactcacatgtgtacaggccaggtcctaatggcaaccttggccgatagagtcaccaccaggcaggacctgggggaggcttccagcatggctggcgagtcatcagcagtgtcctgccctgcagagctccaggcctggcatggtctccagactttcagcctggagcgaacctgctgctaccaggccttgctggtggatgaggagcgtggacgcctgtttgtgggtgccgagaaccatgtggcctccctcaacctggacaacatcagcaagcgggccaagaaggtgccagggactcccaaccccagcactccccagggaaggagccctgggaccccactccagcctggagagacccagaggaatggctccctgaggtagagaatatcccaagttcctgacctgtgtcccctctcccccaacctcccgatagctggcctggccggcccctgtggaatggcgagaggagtgcaactgggcagggaaggacattggtgtgagtgccagctgcccgggccgggagtggggagggtcagcccctcaccccagagacagggcagggctaaaacagaggcctgcctgttctggctgggatgagggcagggaggtcgaggtggctgaggtctgggggtggtgagtcagggtgggggctcgtgtaattcttctggggtgcctctgagtcatgggaggctttgcaggcctgtgcttccccagacacccaccctcgtgaggcctgggctggtcagcaagggcccccaggtccctgtagcccatgttagtacttgcctgggctgatgccgaagagagggaggggtgaggatgccactggtgagctgggacctcttaaggctacgtccctgggggaagcctcacacctccaaccctactagactgagtgcatgaacttcgtgaagttgctgcatgcctacaaccgcacccatttgctggcctgtggcacgggagccttccacccaacctgtgcctttgtggaagtgggccaccgggcagaggtaaggccggatctaggcagggagggaggtcaggagggtaagaagggcctggtagtcacaacttgccacacctcccaggagcccgtcctccggctggacccaggaaggatagaggatggcaaggggaagagtccttatgaccccaggcatcgggctgcctccgtgctggtgggtgagtccaagggctaaggccccaagagaaccccttagaaactctagaacctcacaaagtcccaagacccccaagagctccagggaatcccccataacctcactcactcccagagctccccaggccctcctgccccaagagccctccatttgcctgagtggcccttgctctgtctgcaggggaggagctatactcaggggtggcagcagacctcatgggacgagactttaccatctttcgcagcctagggcaacgtccaagtctccgaacagagccacacgactcccgctggctcaatggtgagaggctggtggggttggtgggtagaggtcgtcaccctcccacagggcaggtgccaagcaaggcccataaagtaagtgagcagtgggtgtggccaggtcttaccaaataccctccttaatcaggcactggcgtcacagagacagacaagacaggtatgaccgtgacctctttgagttcacagatcacatacatgataagatcaagtccaatggccttgaggccagagagagacaagggaggaagggaaaaggagactgggtggctggagggggttgggtaaaggaagccgctgtgctgaggggagtatgagctaattcccaagcacaagacagctagccagcaaaatttagggatgagcattccaggcagagggagcattccaggcagagggagcaactagtgcaaaggcctggatgcaagaacaagcaaaggaatagacttgcagagctagcaatgaaaagggggcctggactgtcaggggccagagtcatttattctaagagtcatgggggctgggcacaatggcttgcacctgtaatcccagcactttgggaggctgaggcagacagattgcttgaagacaggagtttcataccagcctgggctacaaagcaagacaaaaaataaaataaaattagctgggggcagtggcatgcacacacctgtagtcctggctagtcaggaggctgagatggaaggatcacttgagcccaggagttggaggctgcagtgagccatgatgctgccactgcaggacagagcagaccctgtctctaaatcaaataaaaattaaataagggctatgggctggtgggcacagtggctcacacctgtaatctcagcactttgggaggcggaggcaggcaaatcgcttgaggccaggagtttgagactagcctggccaacatggtgaaaccctgtctctactaaaaaatacaaaaattggccgggtgcagtggtgtgcacctgtaatcccagcactttgggaggctgaggcgggcggatcacctgagttcaggcatttgagaccagcctggccaacatggtgtaaccccgtctctactaaatatacaaaaattagtccggcatgatggtgtgcatctgtaatcccagctactcaggaggctgaggcaggagaatcgcttgaacctaggaggcggaggttgcagtgaatggagactgtgccactgcattccagcctgggcaatagagcgagacttcgtctcaaaaaaaaaaaaaaaagccaggtgtggtggtaggctctgactgtaatctcagctacttgggaggctgaggttgcagtgagccgagatcgagcactccagcctgggcgacagagcgagactgtctcaaaaaataaataaataaacaaataataataataataataataataaagagcaatgggacccagcagaaggatttgaagcaggagtggggagcatctggttatgctagagaggaagattcatgagtgaaggtgaaaccagattacctcatctccctcctaccccagcctaaggtgctgggcgacgtgtggggcgagatcggaggctagccgggcttcacgcctgcgcccccaggtagccacggtctctgctgccccctcgcggctgcttcttgcctcgcaggccctgatcctttggattcggtccgcgcagagcgccaactggacatggtgctagaggttgggtggtcagacactgtgatcccgggtgctgtgcccgcactacgggaaggggaagcagcgcgtgggtctcgcatcaggaggcaaggccaggacccgctgacccatgcctcctgccgcggtcagagcccaagtttgtcaaggtattttggatcccggagagcgagaacccagacgacgacaaaatctacttcttctttcgtgagacggcggtagaggcggcgccggcactgggacgcctgtccgtgtcccgcgttggccagatctgccgggtgaggagtccctgggccacacccggcgaccctgcccctacccctttgcctgccctggtctcgccctcatcccctttgatcgtcccggcagaacgacgtgggcggccagcgcagcctggtcaacaagtggacgacgttcctgaaggcgcggctggtgtgctcggtgcccggcgtcgagggcgacacccacttcgatcagctccgtgagtgcgggagtgggtatggggttggggaggggggcagcggcgcagactccgggagcccccgccgcagcggggctgtgcgccctaccccagctaggccccttccccgcagaggatgtgtttctgttgtcctcgcgggaccaccggaccccgctgctctatgccgtcttctccacgtccaggtgaggggcaggaggtagggagcgcccggggcgggccgctgggctccacccggcccctcacctcgccctggtcttcgcctccagcagcatcttccagggctctgcggtgtgcgtgtacagcatgaacgacgtgcgccgggccttcttgggaccctttgcacacaaggaggggcccatgcaccagtgggtgtcataccagggtcgcgtcccctacccgcggccaggcatggttcgtagcccagggacttctgctacaacccacttcaaagcctcaagggtttgagaacttggcctggggtcttcttggtgaatgtggtttcttcctttagttatgggtgggaaaacgtttccatcataagacaaggcttgtttcccgcctctgacttcctagggcaaggctgatctcctctctaattctcagggcagggttctgtccccatccccctccatgttcccagaggctgggcatggagggctgcctatcaagcccccatatctatatccctgctgtgcctccctttcccccacccccagtgccccagcaagacctttggcaccttcagttccaccaaggacttcccagacgatgtcatccagtttgcgcggaaccaccccctcatgtacaactctgtcctgcccactggggggcgccctcttttcctacaagttggagccaattacaccttcactcaaattgccgcggaccgggttgcagccgctgacggacactatgacgtcctcttcattggcacaggtcagggtccctccacagcgacccccaggctcccagccaggccctgtgggctgctgatggaagctctccctgttcagtcccatctccacatcctttcctgggctgtgtctccaccctgtggatgctgcccaacccacactcttccagtccacactcttcacaacccaaacatgctgagggtagacgcctcaaaggcgaggagacactagccccagctgtccgggagcaccaatggtcattaccccttctcatccctgcagacgttggcacggtgctgaaggtgatctcggtccccaagggcagtaggcccagcgcagaggggctgctcctggaggagctgcacgtgtttgaggtgaggcctcacccccagtcgcccgggacccccccaccccactaagccctgaccccgtcgcccctcctccctctcaggactcggccgctgtcaccagcatgcaaatttcttccaagagggtgagtgaccaggatgggggtcggggtgggatggactgagcttgtgcctggcgcgtcccaagcctctggccccttttggtagtttgcagtcccgggtttgagtacaggctctggctttgttagactgtgtgacctgaggcgtaagacctcagtgttcccatctgtcgagtggaagaagggatccctgaccgatgggaggcaggcgtggggtcgccctcggtcagcccagagcccctcgtgccccctagcaccagctgtacgtagcctcgcggagcgcggtggcccagatcgcgttgcaccgctgcgctgcccacggccgcgtctgcaccgaatgctgtctggcgcgtgacccctactgcgcctgggacggggtcgcgtgcacgcgcttccagcccagtgccaagaggtgggcggggtcggggttgggccgccgggagggaggcgaagggtctttcactgcccggggctgaaagaagggctcacagaagatcggatgttccccacaggcggttccggcggcaagacgtaaggaatggcgaccccagcacgttgtgctccggaggtgagtgccccagctgcccctaccctcagccccagaagacgccccacctgccctgccttgcctaaatctgactttcttctcgccccaagactcgtctcgtcccgcgctgctggaacacaaggtgttcggcgtggagggcagcagcgcctttctggagtgtgagccccgctcgctgcaggcgcgcgtggagtggactttccagcgcgcaggggtgacagcccacacccaggtgagccttactccgccctccccgccaggctcctgtcccaccccctgcatccaggagaggccccgccctacccaacgaagccccgtccaaccagacccactccccgccctgtccagtttggtccctcacctgcactccacaagctgctgaggccccattgcgtccaacggggctcccgacccgcctcccctgaatcaaggagaagacccgccctcgaccctcccattaaggtccctgaccaccccccaccaagttcatgtaaaccccgcctctttcggattctcccttgaagaccaccagctcccaaacactcagccttaaaatgtgcgcctgcgggcacccctttcccgctccacctcggctcccaatgactctttgcttcttccgtcgcgtgctagggcccggaagccctgttcccggcccgacacccccgcctcacgctgccctctgcccgcaggtgctggcagaggagcgcaccgagcgcaccgcccggggactactgctgcgcaggctgcggcgccgggactcgggcgtgtacttgtgcgccgccgtcgagcagggctttacgcaaccgctgcgtcgcctgtcgctgcacgtgttgagtgctacgcaggccgaacgactggcgcgggccgaggaggctgcgcccgccgcgccgccgggccccaaactctggtaccgggactttctgcagctggtggagccgggcggaggtggcagcgcgaactccctgcgcatgtgccgcccgcagcctgcgctgcagtcactgcccctggagtcgcggagaaagggccgtaaccggaggacccacgcccctgagcctcgcgctgagcgggggccgcgcagcgcaacgcactggtgaccagactgtccccacgccgggaaccaagcaggagacgacaggcgagagaggagccagacagaccctgaaaagaaggacgggttggggccgggcacattgggggtcaccggccgatggagacaccaaccgacaggccctggctgagggcagctgcgcgggcttatttattaacaggataacccttgaatgtagcagccccgggagggcggcacaggtcgggcgcaggattcagccggagggaagggacggggaagccgagctccagagcaacgaccagggccgaggaggtgcctggagtgcccaccctgggagacagaccccacctccttgggtagtgagcagtgagcagaaagctgtgaacaggctgggctgctggaggtggggcgaggcaggccgactgtactaaagtaacgcaataaacgcattatcagccaaa

SEQ ID NO: 13907 - DNA, 2755 bp, Homo sapiens
gcagagtccagggcagctcaaggctcctccacacacacacccgctgaaccctgagcaccctgagctgctgagatggggcgggccggggctgccgccgtgatcccgggcctggccctgctctgggcagtggggctggggagtgccgcccccagccccccacgccttcggctctccttccaagagctccaggcctggcatggtctccagactttcagcctggagcgaacctgctgctaccaggccttgctggtggatgaggagcgtggacgcctgtttgtgggtgccgagaaccatgtggcctccctcaacctggacaacatcagcaagcgggccaagaagctggcctggccggcccctgtggaatggcgagaggagtgcaactgggcagggaaggacattggtactgagtgcatgaacttcgtgaagttgctgcatgcctacaaccgcacccatttgctggcctgtggcacgggagccttccacccaacctgtgcctttgtggaagtgggccaccgggcagaggagcccgtcctccggctggacccaggaaggatagaggatggcaaggggaagagtccttatgaccccaggcatcgggctgcctccgtgctggtgggggaggagctatactcaggggtggcagcagacctcatgggacgagactttaccatctttcgcagcctagggcaacgtccaagtctccgaacagagccacacgactcccgctggctcaatgagcccaagtttgtcaaggtattttggatcccggagagcgagaacccagacgacgacaaaatctacttcttctttcgtgagacggcggtagaggcggcgccggcactgggacgcctgtccgtgtcccgcgttggccagatctgccggaacgacgtgggcggccagcgcagcctggtcaacaagtggacgacgttcctgaaggcgcggctggtgtgctcggtgcccggcgtcgagggcgacacccacttcgatcagctccaggatgtgtttctgttgtcctcgcgggaccaccggaccccgctgctctatgccgtcttctccacgtccagcatcttccagggctctgcggtgtgcgtgtacagcatgaacgacgtgcgccgggccttcttgggaccctttgcacacaaggaggggcccatgcaccagtgggtgtcataccagggtcgcgtcccctacccgcggccaggcatgtgccccagcaagacctttggcaccttcagttccaccaaggacttcccagacgatgtcatccagtttgcgcggaaccaccccctcatgtacaactctgtcctgcccactggggggcgccctcttttcctacaagttggagccaattacaccttcactcaaattgccgcggaccgggttgcagccgctgacggacactatgacgtcctcttcattggcacagacgttggcacggtgctgaaggtgatctcggtccccaagggcagtaggcccagcgcagaggggctgctcctggaggagctgcacgtgtttgaggactcggccgctgtcaccagcatgcaaatttcttccaagaggcaccagctgtacgtagcctcgcggagcgcggtggcccagatcgcgttgcaccgctgcgctgcccacggccgcgtctgcaccgaatgctgtctggcgcgtgacccctactgcgcctgggacggggtcgcgtgcacgcgcttccagcccagtgccaagaggcggttccggcggcaagacgtaaggaatggcgaccccagcacgttgtgctccggagactcgtctcgtcccgcgctgctggaacacaaggtgttcggcgtggagggcagcagcgcctttctggagtgtgagccccgctcgctgcaggcgcgcgtggagtggactttccagcgcgcaggggtgacagcccacacccaggtgctggcagaggagcgcaccgagcgcaccgcccggggactactgctgcgcaggctgcggcgccgggactcgggcgtgtacttgtgcgccgccgtcgagcagggctttacgcaaccgctgcgtcgcctgtcgctgcacgtgttgagtgctacgcaggccgaacgactggcgcgggccgaggaggctgcgcccgccgcgccgccgggccccaaactctggtaccgggactttctgcagctggtggagccgggcggaggtggcagcgcgaactccctgcgcatgtgccgcccgcagcctgcgctgcagtcactgcccctggagtcgcggagaaagggccgtaaccggaggacccacgcccctgagcctcgcgctgagcgggggccgcgcagcgcaacgcactggtgaccagactgtccccacgccgggaaccaagcaggagacgacaggcgagagaggagccagacagaccctgaaaagaaggacgggttggggccgggcacattgggggtcaccggccgatggagacaccaaccgacaggccctggctgagggcagctgcgcgggcttatttattaacaggataacccttgaatgtagcagccccgggagggcggcacaggtcgggcgcaggattcagccggagggaagggacggggaagccgagctccagagcaacgaccagggccgaggaggtgcctggagtgcccaccctgggagacagaccccacctccttgggtagtgagcagtgagcagaaagctgtgaacaggctgggctgctggaggtggggcgaggcaggccgactgtactaaagtaacgcaataaacgcattatcagccaaa

SEQ ID NO: 13908 - DNA, 1189 bp, Homo sapiens
aactggacatggtgctagaggttgggtggtcagacactgtgatcccgggtgctgtgcccgcactacgggaaggggaagcagcgcgtgggtctcgcatcaggaggcaaggccaggacccgctgacccatgcctcctgccgcggtcagagcccaagtttgtcaaggtattttggatcccggagagcgagaacccagacgacgacaaaatctacttcttctttcgtgagacggcggtagaggcggcgccggcactgggacgcctgtccgtgtcccgcgttggccagatctgccgggtgaggagtccctgggccacacccggcgaccctgcccctacccctttgcctgccctggtctcgccctcatcccctttgatcgtcccggcagaacgacgtgggcggccagcgcagcctggtcaacaagtggacgacgttcctgaaggcgcggctggtgtgctcggtgcccggcgtcgagggcgacacccacttcgatcagctccgtgagtgcgggagtgggtatggggttggggaggggggcagcggcgcagactccgggagcccccgccgcagcggggctgtgcgccctaccccagctaggccccttccccgcagaggatgtgtttctgttgtcctcgcgggaccaccggaccccgctgctctatgccgtcttctccacgtccaggtgaggggcaggaggtagggagcgcccggggcgggccgctgggctccacccggcccctcacctcgccctggtcttcgcctccagcagcatcttccagggctctgcggtgtgcgtgtacagcatgaacgacgtgcgccgggccttcttgggaccctttgcacacaaggaggggcccatgcaccagtgggtgtcataccagggtcgcgtcccctacccgcggccaggcatggttcgtagcccagggacttctgctacaacccacttcaaagcctcaagggtttgagaacttggcctggggtcttcttggtgaatgtggtttcttcctttagttatgggtgggaaaacgtttccatcataagacaaggcttgtttcccgcctctgacttcctagggcaaggctgatctcctctctaattctcagggcagggttctgtccccatccccctccatgttcccagaggctgggcatggagggctgcctatcaagcccccatatctatatccctgctgtg

SEQ ID NO: 13909 - DNA, 1011 bp, Homo sapiens
aactggacatggtgctagaggttgggtggtcagacactgtgatcccgggtgctgtgcccgcactacgggaaggggaagcagcgcgtgggtctcgcatcaggaggcaaggccaggacccgctgacccatgcctcctgccgcggtcagagcccaagtttgtcaaggtattttggatcccggagagcgagaacccagacgacgacaaaatctacttcttctttcgtgagacggcggtagaggcggcgccggcactgggacgcctgtccgtgtcccgcgttggccagatctgccggaacgacgtgggcggccagcgcagcctggtcaacaagtggacgacgttcctgaaggcgcggctggtgtgctcggtgcccggcgtcgagggcgacacccacttcgatcagctccgtgagtgcgggagtgggtatggggttggggaggggggcagcggcgcagactccgggagcccccgccgcagcggggctgtgcgccctaccccagctaggccccttccccgcagaggatgtgtttctgttgtcctcgcgggaccaccggaccccgctgctctatgccgtcttctccacgtccagcatcttccagggctctgcggtgtgcgtgtacagcatgaacgacgtgcgccgggccttcttgggaccctttgcacacaaggaggggcccatgcaccagtgggtgtcataccagggtcgcgtcccctacccgcggccaggcatggttcgtagcccagggacttctgctacaacccacttcaaagcctcaagggtttgagaacttggcctggggtcttcttggtgaatgtggtttcttcctttagttatgggtgggaaaacgtttccatcataagacaaggcttgtttcccgcctctgacttcctagggcaaggctgatctcctctctaattctcagggcagggttctgtccccatccccctccatgttcccagaggctgggcatggagggctgcctatcaagcccccatatctatatccctgctgtg

SEQ ID NO: 13910 - DNA, 1401 bp, Homo sapiens
gattcggtccgcgcagagcgccaactggacatggtgctagaggttgggtggtcagacactgtgatcccgggtgctgtgcccgcactacgggaaggggaagcagcgcgtgggtctcgcatcaggaggcaaggccaggacccgctgacccatgcctcctgccgcggtcagagcccaagtttgtcaaggtattttggatcccggagagcgagaacccagacgacgacaaaatctacttcttctttcgtgagacggcggtagaggcggcgccggcactgggacgcctgtccgtgtcccgcgttggccagatctgccgggtgaggagtccctgggccacacccggcgaccctgcccctacccctttgcctgccctggtctcgccctcatcccctttgatcgtcccggcagaacgacgtgggcggccagcgcagcctggtcaacaagtggacgacgttcctgaaggcgcggctggtgtgctcggtgcccggcgtcgagggcgacacccacttcgatcagctccgtgagtgcgggagtgggtatggggttggggaggggggcagcggcgcagactccgggagcccccgccgcagcggggctgtgcgccctaccccagctaggccccttccccgcagaggatgtgtttctgttgtcctcgcgggaccaccggaccccgctgctctatgccgtcttctccacgtccaggtgaggggcaggaggtagggagcgcccggggcgggccgctgggctccacccggcccctcacctcgccctggtcttcgcctccagcagcatcttccagggctctgcggtgtgcgtgtacagcatgaacgacgtgcgccgggccttcttgggaccctttgcacacaaggaggggcccatgcaccagtgggtgtcataccagggtcgcgtcccctacccgcggccaggcatggttcgtagcccagggacttctgctacaacccacttcaaagcctcaagggtttgagaacttggcctggggtcttcttggtgaatgtggtttcttcctttagttatgggtgggaaaacgtttccatcataagacaaggcttgtttcccgcctctgacttcctagggcaaggctgatctcctctctaattctcagggcagggttctgtccccatccccctccatgttcccagaggctgggcatggagggctgcctatcaagcccccatatctatatccctgctgtgcctccctttcccccacccccagtgccccagcaagacctttggcaccttcagttccaccaaggacttcccagacgatgtcatccagtttgcgcggaaccaccccctcatgtacaactctgtcctgcccactggggggcgccctcttttcctacaagttggagccaattacaccttcactcaaattgccgcg

SEQ ID NO: 13911 - DNA, 594 bp, Homo sapiens
gattcggtccgcgcagagcgccaactggacatggtgctagaggttgggtggtcagacactgtgatcccgggtgctgtgcccgcactacgggaaggggaagcagcgcgtgggtctcgcatcaggaggcaaggccaggacccgctgacccatgcctcctgccgcggtcagagcccaagtttgtcaaggtattttggatcccggagagcgagaacccagacgacgacaaaatctacttcttctttcgtgagacggcggtagaggcggcgccggcactgggacgcctgtccgtgtcccgcgttggccagatctgccggaacgacgtgggcggccagcgcagcctggtcaacaagtggacgacgttcctgaaggcgcggctggtgtgctcggtgcccggcgtcgagggcgacacccacttcgatcagctcctgccccagcaagacctttggcaccttcagttccaccaaggacttcccagacgatgtcatccagtttgcgcggaaccaccccctcatgtacaactctgtcctgcccactggggggcgccctcttttcctacaagttggagccaattacaccttcactcaaattgccgcg

SEQ ID NO: 13912 - DNA, 6610 bp, Homo sapiens
gctaaaacagaggcctgcctgttctggctgggatgagggcagggaggtcgaggtggctgaggtctgggggtggtgagtcagggtgggggctcgtgtaattcttctggggtgcctctgagtcatgggaggctttgcaggcctgtgcttccccagacacccaccctcgtgaggcctgggctggtcagcaagggcccccaggtccctgtagcccatgttagtacttgcctgggctgatgccgaagagagggaggggtgaggatgccactggtgagctgggacctcttaaggctacgtccctgggggaagcctcacacctccaaccctactagactgagtgcatgaacttcgtgaagttgctgcatgcctacaaccgcacccatttgctggcctgtggcacgggagccttccacccaacctgtgcctttgtggaagtgggccaccgggcagaggtaaggccggatctaggcagggagggaggtcaggagggtaagaagggcctggtagtcacaacttgccacacctcccaggagcccgtcctccggctggacccaggaaggatagaggatggcaaggggaagagtccttatgaccccaggcatcgggctgcctccgtgctggtgggtgagtccaagggctaaggccccaagagaaccccttagaaactctagaacctcacaaagtcccaagacccccaagagctccagggaatcccccataacctcactcactcccagagctccccaggccctcctgccccaagagccctccatttgcctgagtggcccttgctctgtctgcaggggaggagctatactcaggggtggcagcagacctcatgggacgagactttaccatctttcgcagcctagggcaacgtccaagtctccgaacagagccacacgactcccgctggctcaatggtgagaggctggtggggttggtgggtagaggtcgtcaccctcccacagggcaggtgccaagcaaggcccataaagtaagtgagcagtgggtgtggccaggtcttaccaaataccctccttaatcaggcactggcgtcacagagacagacaagacaggtatgaccgtgacctctttgagttcacagatcacatacatgataagatcaagtccaatggccttgaggccagagagagacaagggaggaagggaaaaggagactgggtggctggagggggttgggtaaaggaagccgctgtgctgaggggagtatgagctaattcccaagcacaagacagctagccagcaaaatttagggatgagcattccaggcagagggagcattccaggcagagggagcaactagtgcaaaggcctggatgcaagaacaagcaaaggaatagacttgcagagctagcaatgaaaagggggcctggactgtcaggggccagagtcatttattctaagagtcatgggggctgggcacaatggcttgcacctgtaatcccagcactttgggaggctgaggcagacagattgcttgaagacaggagtttcataccagcctgggctacaaagcaagacaaaaaataaaataaaattagctgggggcagtggcatgcacacacctgtagtcctggctagtcaggaggctgagatggaaggatcacttgagcccaggagttggaggctgcagtgagccatgatgctgccactgcaggacagagcagaccctgtctctaaatcaaataaaaattaaataagggctatgggctggtgggcacagtggctcacacctgtaatctcagcactttgggaggcggaggcaggcaaatcgcttgaggccaggagtttgagactagcctggccaacatggtgaaaccctgtctctactaaaaaatacaaaaattggccgggtgcagtggtgtgcacctgtaatcccagcactttgggaggctgaggcgggcggatcacctgagttcaggcatttgagaccagcctggccaacatggtgtaaccccgtctctactaaatatacaaaaattagtccggcatgatggtgtgcatctgtaatcccagctactcaggaggctgaggcaggagaatcgcttgaacctaggaggcggaggttgcagtgaatggagactgtgccactgcattccagcctgggcaatagagcgagacttcgtctcaaaaaaaaaaaaaaaagccaggtgtggtggtaggctctgactgtaatctcagctacttgggaggctgaggttgcagtgagccgagatcgagcactccagcctgggcgacagagcgagactgtctcaaaaaataaataaataaacaaataataataataataataataataaagagcaatgggacccagcagaaggatttgaagcaggagtggggagcatctggttatgctagagaggaagattcatgagtgaaggtgaaaccagattacctcatctccctcctaccccagcctaaggtgctgggcgacgtgtggggcgagatcggaggctagccgggcttcacgcctgcgcccccaggtagccacggtctctgctgccccctcgcggctgcttcttgcctcgcaggccctgatcctttggattcggtccgcgcagagcgccaactggacatggtgctagaggttgggtggtcagacactgtgatcccgggtgctgtgcccgcactacgggaaggggaagcagcgcgtgggtctcgcatcaggaggcaaggccaggacccgctgacccatgcctcctgccgcggtcagagcccaagtttgtcaaggtattttggatcccggagagcgagaacccagacgacgacaaaatctacttcttctttcgtgagacggcggtagaggcggcgccggcactgggacgcctgtccgtgtcccgcgttggccagatctgccgggtgaggagtccctgggccacacccggcgaccctgcccctacccctttgcctgccctggtctcgccctcatcccctttgatcgtcccggcagaacgacgtgggcggccagcgcagcctggtcaacaagtggacgacgttcctgaaggcgcggctggtgtgctcggtgcccggcgtcgagggcgacacccacttcgatcagctccgtgagtgcgggagtgggtatggggttggggaggggggcagcggcgcagactccgggagcccccgccgcagcggggctgtgcgccctaccccagctaggccccttccccgcagaggatgtgtttctgttgtcctcgcgggaccaccggaccccgctgctctatgccgtcttctccacgtccaggtgaggggcaggaggtagggagcgcccggggcgggccgctgggctccacccggcccctcacctcgccctggtcttcgcctccagcagcatcttccagggctctgcggtgtgcgtgtacagcatgaacgacgtgcgccgggccttcttgggaccctttgcacacaaggaggggcccatgcaccagtgggtgtcataccagggtcgcgtcccctacccgcggccaggcatggttcgtagcccagggacttctgctacaacccacttcaaagcctcaagggtttgagaacttggcctggggtcttcttggtgaatgtggtttcttcctttagttatgggtgggaaaacgtttccatcataagacaaggcttgtttcccgcctctgacttcctagggcaaggctgatctcctctctaattctcagggcagggttctgtccccatccccctccatgttcccagaggctgggcatggagggctgcctatcaagcccccatatctatatccctgctgtgcctccctttcccccacccccagtgccccagcaagacctttggcaccttcagttccaccaaggacttcccagacgatgtcatccagtttgcgcggaaccaccccctcatgtacaactctgtcctgcccactggggggcgccctcttttcctacaagttggagccaattacaccttcactcaaattgccgcggaccgggttgcagccgctgacggacactatgacgtcctcttcattggcacaggtcagggtccctccacagcgacccccaggctcccagccaggccctgtgggctgctgatggaagctctccctgttcagtcccatctccacatcctttcctgggctgtgtctccaccctgtggatgctgcccaacccacactcttccagtccacactcttcacaacccaaacatgctgagggtagacgcctcaaaggcgaggagacactagccccagctgtccgggagcaccaatggtcattaccccttctcatccctgcagacgttggcacggtgctgaaggtgatctcggtccccaagggcagtaggcccagcgcagaggggctgctcctggaggagctgcacgtgtttgaggtgaggcctcacccccagtcgcccgggacccccccaccccactaagccctgaccccgtcgcccctcctccctctcaggactcggccgctgtcaccagcatgcaaatttcttccaagagggtgagtgaccaggatgggggtcggggtgggatggactgagcttgtgcctggcgcgtcccaagcctctggccccttttggtagtttgcagtcccgggtttgagtacaggctctggctttgttagactgtgtgacctgaggcgtaagacctcagtgttcccatctgtcgagtggaagaagggatccctgaccgatgggaggcaggcgtggggtcgccctcggtcagcccagagcccctcgtgccccctagcaccagctgtacgtagcctcgcggagcgcggtggcccagatcgcgttgcaccgctgcgctgcccacggccgcgtctgcaccgaatgctgtctggcgcgtgacccctactgcgcctgggacggggtcgcgtgcacgcgcttccagcccagtgccaagaggtgggcggggtcggggttgggccgccgggagggaggcgaagggtctttcactgcccggggctgaaagaagggctcacagaagatcggatgttccccacaggcggttccggcggcaagacgtaaggaatggcgaccccagcacgttgtgctccggaggtgagtgccccagctgcccctaccctcagccccagaagacgccccacctgccctgccttgcctaaatctgactttcttctcgccccaagactcgtctcgtcccgcgctgctggaacacaaggtgttcggcgtggagggcagcagcgcctttctggagtgtgagccccgctcgctgcaggcgcgcgtggagtggactttccagcgcgcaggggtgacagcccacacccaggtgagccttactccgccctccccgccaggctcctgtcccaccccctgcatccaggagaggccccgccctacccaacgaagccccgtccaaccagacccactccccgccctgtccagtttggtccctcacctgcactccacaagctgctgaggccccattgcgtccaacggggctcccgacccgcctcccctgaatcaaggagaagacccgccctcgaccctcccattaaggtccctgaccaccccccaccaagttcatgtaaaccccgcctctttcggattctcccttgaagaccaccagctcccaaacactcagccttaaaatgtgcgcctgcgggcacccctttcccgctccacctcggctcccaatgactctttgcttcttccgtcgcgtgctagggcccggaagccctgttcccggcccgacacccccgcctcacgctgccctctgcccgcaggtgctggcagaggagcgcaccgagcgcaccgcccggggactactgctgcgcaggctgcggcgccgggactcgggcgtgtacttgtgcgccgccgtcgagcagggctttacgcaaccgctgcgtcgcctgtcgctgcacgtgttgagtgctacgcaggccgaacgactggcgcgggccgaggaggctgcgcccgccgcgccgccgggccccaaactctggtaccgggactttctgcagctggtggagccgggcggaggtggcagcgcgaactccctgcgcatgtgccgcccgcagcctgcgctgcagtcactgcccctggagtcgcggagaaagggccgtaaccggaggacccacgcccctgagcctcgcgctgagcgggggccgcgcagcgcaacgcactggtgaccagactgtccccacgccgggaaccaagcaggagacgacaggcgagagaggagccagacagaccctgaaaagaaggacgggttggggccgggcacattgggggtcaccggccgatggagacaccaaccgacaggccctggctgagggcagctgcgcgggcttatttattaacaggataacccttgaatgtagcagccccgggagggcggcacaggtcgggcgcaggattcagccggagggaagggacggggaagccgagctccagagcaacgaccagggccgaggaggtgcctggagtgcccaccctgggagacagaccccacctccttgggtagtgagcagtgagcagaaagctgtgaacaggctgggctgctggaggtggggcgaggcaggccgactgtactaaagtaacgcaataaacgcattatcagccaaagctggaatggccccagcagaaaacccca

SEQ ID NO: 13913 - DNA, 2710 bp, Homo sapiens
gctaaaacagaggcctgcctgttctggctgggatgagggcagggaggtcgaggtggctgaggtctgggggtggtgagtcagggtgggggctcgtgtaattcttctggggtgcctctgagtcatgggaggctttgcaggcctgtgcttccccagacacccaccctcgtgaggcctgggctggtcagcaagggcccccaggtccctgtagcccatgttagtacttgcctgggctgatgccgaagagagggaggggtgaggatgccactggtgagctgggacctcttaaggctacgtccctgggggaagcctcacacctccaaccctactagactgagtgcatgaacttcgtgaagttgctgcatgcctacaaccgcacccatttgctggcctgtggcacgggagccttccacccaacctgtgcctttgtggaagtgggccaccgggcagaggagcccgtcctccggctggacccaggaaggatagaggatggcaaggggaagagtccttatgaccccaggcatcgggctgcctccgtgctggtgggggaggagctatactcaggggtggcagcagacctcatgggacgagactttaccatctttcgcagcctagggcaacgtccaagtctccgaacagagccacacgactcccgctggctcaatgagcccaagtttgtcaaggtattttggatcccggagagcgagaacccagacgacgacaaaatctacttcttctttcgtgagacggcggtagaggcggcgccggcactgggacgcctgtccgtgtcccgcgttggccagatctgccggaacgacgtgggcggccagcgcagcctggtcaacaagtggacgacgttcctgaaggcgcggctggtgtgctcggtgcccggcgtcgagggcgacacccacttcgatcagctccaggatgtgtttctgttgtcctcgcgggaccaccggaccccgctgctctatgccgtcttctccacgtccagcatcttccagggctctgcggtgtgcgtgtacagcatgaacgacgtgcgccgggccttcttgggaccctttgcacacaaggaggggcccatgcaccagtgggtgtcataccagggtcgcgtcccctacccgcggccaggcatgtgccccagcaagacctttggcaccttcagttccaccaaggacttcccagacgatgtcatccagtttgcgcggaaccaccccctcatgtacaactctgtcctgcccactggggggcgccctcttttcctacaagttggagccaattacaccttcactcaaattgccgcggaccgggttgcagccgctgacggacactatgacgtcctcttcattggcacagacgttggcacggtgctgaaggtgatctcggtccccaagggcagtaggcccagcgcagaggggctgctcctggaggagctgcacgtgtttgaggactcggccgctgtcaccagcatgcaaatttcttccaagaggcaccagctgtacgtagcctcgcggagcgcggtggcccagatcgcgttgcaccgctgcgctgcccacggccgcgtctgcaccgaatgctgtctggcgcgtgacccctactgcgcctgggacggggtcgcgtgcacgcgcttccagcccagtgccaagaggcggttccggcggcaagacgtaaggaatggcgaccccagcacgttgtgctccggagactcgtctcgtcccgcgctgctggaacacaaggtgttcggcgtggagggcagcagcgcctttctggagtgtgagccccgctcgctgcaggcgcgcgtggagtggactttccagcgcgcaggggtgacagcccacacccaggtgctggcagaggagcgcaccgagcgcaccgcccggggactactgctgcgcaggctgcggcgccgggactcgggcgtgtacttgtgcgccgccgtcgagcagggctttacgcaaccgctgcgtcgcctgtcgctgcacgtgttgagtgctacgcaggccgaacgactggcgcgggccgaggaggctgcgcccgccgcgccgccgggccccaaactctggtaccgggactttctgcagctggtggagccgggcggaggtggcagcgcgaactccctgcgcatgtgccgcccgcagcctgcgctgcagtcactgcccctggagtcgcggagaaagggccgtaaccggaggacccacgcccctgagcctcgcgctgagcgggggccgcgcagcgcaacgcactggtgaccagactgtccccacgccgggaaccaagcaggagacgacaggcgagagaggagccagacagaccctgaaaagaaggacgggttggggccgggcacattgggggtcaccggccgatggagacaccaaccgacaggccctggctgagggcagctgcgcgggcttatttattaacaggataacccttgaatgtagcagccccgggagggcggcacaggtcgggcgcaggattcagccggagggaagggacggggaagccgagctccagagcaacgaccagggccgaggaggtgcctggagtgcccaccctgggagacagaccccacctccttgggtagtgagcagtgagcagaaagctgtgaacaggctgggctgctggaggtggggcgaggcaggccgactgtactaaagtaacgcaataaacgcattatcagccaaagctggaatggccccagcagaaaacccca

SEQ ID NO: 13914 - DNA, 4390 bp, Homo sapiens
gacatggtgctagaggttgggtggtcagacactgtgatcccgggtgctgtgcccgcactacgggaaggggaagcagcgcgtgggtctcgcatcaggaggcaaggccaggacccgctgacccatgcctcctgccgcggtcagagcccaagtttgtcaaggtattttggatcccggagagcgagaacccagacgacgacaaaatctacttcttctttcgtgagacggcggtagaggcggcgccggcactgggacgcctgtccgtgtcccgcgttggccagatctgccgggtgaggagtccctgggccacacccggcgaccctgcccctacccctttgcctgccctggtctcgccctcatcccctttgatcgtcccggcagaacgacgtgggcggccagcgcagcctggtcaacaagtggacgacgttcctgaaggcgcggctggtgtgctcggtgcccggcgtcgagggcgacacccacttcgatcagctccgtgagtgcgggagtgggtatggggttggggaggggggcagcggcgcagactccgggagcccccgccgcagcggggctgtgcgccctaccccagctaggccccttccccgcagaggatgtgtttctgttgtcctcgcgggaccaccggaccccgctgctctatgccgtcttctccacgtccaggtgaggggcaggaggtagggagcgcccggggcgggccgctgggctccacccggcccctcacctcgccctggtcttcgcctccagcagcatcttccagggctctgcggtgtgcgtgtacagcatgaacgacgtgcgccgggccttcttgggaccctttgcacacaaggaggggcccatgcaccagtgggtgtcataccagggtcgcgtcccctacccgcggccaggcatggttcgtagcccagggacttctgctacaacccacttcaaagcctcaagggtttgagaacttggcctggggtcttcttggtgaatgtggtttcttcctttagttatgggtgggaaaacgtttccatcataagacaaggcttgtttcccgcctctgacttcctagggcaaggctgatctcctctctaattctcagggcagggttctgtccccatccccctccatgttcccagaggctgggcatggagggctgcctatcaagcccccatatctatatccctgctgtgcctccctttcccccacccccagtgccccagcaagacctttggcaccttcagttccaccaaggacttcccagacgatgtcatccagtttgcgcggaaccaccccctcatgtacaactctgtcctgcccactggggggcgccctcttttcctacaagttggagccaattacaccttcactcaaattgccgcggaccgggttgcagccgctgacggacactatgacgtcctcttcattggcacaggtcagggtccctccacagcgacccccaggctcccagccaggccctgtgggctgctgatggaagctctccctgttcagtcccatctccacatcctttcctgggctgtgtctccaccctgtggatgctgcccaacccacactcttccagtccacactcttcacaacccaaacatgctgagggtagacgcctcaaaggcgaggagacactagccccagctgtccgggagcaccaatggtcattaccccttctcatccctgcagacgttggcacggtgctgaaggtgatctcggtccccaagggcagtaggcccagcgcagaggggctgctcctggaggagctgcacgtgtttgaggtgaggcctcacccccagtcgcccgggacccccccaccccactaagccctgaccccgtcgcccctcctccctctcaggactcggccgctgtcaccagcatgcaaatttcttccaagagggtgagtgaccaggatgggggtcggggtgggatggactgagcttgtgcctggcgcgtcccaagcctctggccccttttggtagtttgcagtcccgggtttgagtacaggctctggctttgttagactgtgtgacctgaggcgtaagacctcagtgttcccatctgtcgagtggaagaagggatccctgaccgatgggaggcaggcgtggggtcgccctcggtcagcccagagcccctcgtgccccctagcaccagctgtacgtagcctcgcggagcgcggtggcccagatcgcgttgcaccgctgcgctgcccacggccgcgtctgcaccgaatgctgtctggcgcgtgacccctactgcgcctgggacggggtcgcgtgcacgcgcttccagcccagtgccaagaggtgggcggggtcggggttgggccgccgggagggaggcgaagggtctttcactgcccggggctgaaagaagggctcacagaagatcggatgttccccacaggcggttccggcggcaagacgtaaggaatggcgaccccagcacgttgtgctccggaggtgagtgccccagctgcccctaccctcagccccagaagacgccccacctgccctgccttgcctaaatctgactttcttctcgccccaagactcgtctcgtcccgcgctgctggaacacaaggtgttcggcgtggagggcagcagcgcctttctggagtgtgagccccgctcgctgcaggcgcgcgtggagtggactttccagcgcgcaggggtgacagcccacacccaggtgagccttactccgccctccccgccaggctcctgtcccaccccctgcatccaggagaggccccgccctacccaacgaagccccgtccaaccagacccactccccgccctgtccagtttggtccctcacctgcactccacaagctgctgaggccccattgcgtccaacggggctcccgacccgcctcccctgaatcaaggagaagacccgccctcgaccctcccattaaggtccctgaccaccccccaccaagttcatgtaaaccccgcctctttcggattctcccttgaagaccaccagctcccaaacactcagccttaaaatgtgcgcctgcgggcacccctttcccgctccacctcggctcccaatgactctttgcttcttccgtcgcgtgctagggcccggaagccctgttcccggcccgacacccccgcctcacgctgccctctgcccgcaggtgctggcagaggagcgcaccgagcgcaccgcccggggactactgctgcgcaggctgcggcgccgggactcgggcgtgtacttgtgcgccgccgtcgagcagggctttacgcaaccgctgcgtcgcctgtcgctgcacgtgttgagtgctacgcaggccgaacgactggcgcgggccgaggaggctgcgcccgccgcgccgccgggccccaaactctggtaccgggactttctgcagctggtggagccgggcggaggtggcagcgcgaactccctgcgcatgtgccgcccgcagcctgcgctgcagtcactgcccctggagtcgcggagaaagggccgtaaccggaggacccacgcccctgagcctcgcgctgagcgggggccgcgcagcgcaacgcactggtgaccagactgtccccacgccgggaaccaagcaggagacgacaggcgagagaggagccagacagaccctgaaaagaaggacgggttggggccgggcacattgggggtcaccggccgatggagacaccaaccgacaggccctggctgagggcagctgcgcgggcttatttattaacaggataacccttgaatgtagcagccccgggagggcggcacaggtcgggcgcaggattcagccggagggaagggacggggaagccgagctccagagcaacgaccagggccgaggaggtgcctggagtgcccaccctgggagacagaccccacctccttgggtagtgagcagtgagcagaaagctgtgaacaggctgggctgctggaggtggggcgaggcaggccgactgtactaaagtaacgcaataaacgcattatcagccaaagctggaatggccccagcagaaaaccccagtcctcggccttgctatgtggtcttgggcaccttactagcggtgtcagggcccgagtttctcctgtccaaggttgcctggtgaggattaaaggtggttccggccaggcgcggtggctcacgcctgtaatcccaacactttcggaggcccaggcggacggatcacgaggtcaggagatggaaaccatcccggctaacacggtgaaaccccgtctgtactaaaaatacaaaaaattagtcgggcgtggtggcgggcgcctgtaatcctagctactcaggaggctgaggcaggagaattgcttgaacctgggaggtggaggttgcaatgagcctagatctcgccgctgcactccagcctgggcgacagagcgagactcc

SEQ ID NO: 13915 - DNA, 2065 bp, Homo sapiens
gacatggtgctagaggttgggtggtcagacactgtgatcccgggtgctgtgcccgcactacgggaaggggaagcagcgcgtgggtctcgcatcaggaggcaaggccaggacccgctgacccatgcctcctgccgcggtcagagcccaagtttgtcaagaacgacgtgggcggccagcgcagcctggtcaacaagtggacgacgttcctgaaggcgcggctggtgtgctcggtgcccggcgtcgagggcgacacccacttcgatcagctcctgccccagcaagacctttggcaccttcagttccaccaaggacttcccagacgatgtcatccagtttgcgcggaaccaccccctcatgtacaactctgtcctgcccactggggggcgccctcttttcctacaagttggagccaattacaccttcactcaaattgccgcggaccgggttgcagccgctgacggacactatgacgtcctcttcattggcacagacgttggcacggtgctgaaggtgatctcggtccccaagggcagtaggcccagcgcagaggggctgctcctggaggagctgcacgtgtttgaggactcggccgctgtcaccagcatgcaaatttcttccaagagggcggttccggcggcaagacgtaaggaatggcgaccccagcacgttgtgctccggagactcgtctcgtcccgcgctgctggaacacaaggtgttcggcgtggagggcagcagcgcctttctggagtgtgagccccgctcgctgcaggcgcgcgtggagtggactttccagcgcgcaggggtgacagcccacacccaggtgctggcagaggagcgcaccgagcgcaccgcccggggactactgctgcgcaggctgcggcgccgggactcgggcgtgtacttgtgcgccgccgtcgagcagggctttacgcaaccgctgcgtcgcctgtcgctgcacgtgttgagtgctacgcaggccgaacgactggcgcgggccgaggaggctgcgcccgccgcgccgccgggccccaaactctggtaccgggactttctgcagctggtggagccgggcggaggtggcagcgcgaactccctgcgcatgtgccgcccgcagcctgcgctgcagtcactgcccctggagtcgcggagaaagggccgtaaccggaggacccacgcccctgagcctcgcgctgagcgggggccgcgcagcgcaacgcactggtgaccagactgtccccacgccgggaaccaagcaggagacgacaggcgagagaggagccagacagaccctgaaaagaaggacgggttggggccgggcacattgggggtcaccggccgatggagacaccaaccgacaggccctggctgagggcagctgcgcgggcttatttattaacaggataacccttgaatgtagcagccccgggagggcggcacaggtcgggcgcaggattcagccggagggaagggacggggaagccgagctccagagcaacgaccagggccgaggaggtgcctggagtgcccaccctgggagacagaccccacctccttgggtagtgagcagtgagcagaaagctgtgaacaggctgggctgctggaggtggggcgaggcaggccgactgtactaaagtaacgcaataaacgcattatcagccaaagctggaatggccccagcagaaaaccccagtcctcggccttgctatgtggtcttgggcaccttactagcggtgtcagggcccgagtttctcctgtccaaggttgcctggtgaggattaaaggtggttccggccaggcgcggtggctcacgcctgtaatcccaacactttcggaggcccaggcggacggatcacgaggtcaggagatggaaaccatcccggctaacacggtgaaaccccgtctgtactaaaaatacaaaaaattagtcgggcgtggtggcgggcgcctgtaatcctagctactcaggaggctgaggcaggagaattgcttgaacctgggaggtggaggttgcaatgagcctagatctcgccgctgcactccagcctgggcgacagagcgagactcc

SEQ ID NO: 13916 - DNA, 4047 bp, Homo sapiens
ctgatcctttggattcggtccgcgcagagcgccaactggacatggtgctagaggttgggtggtcagacactgtgatcccgggtgctgtgcccgcactacgggaaggggaagcagcgcgtgggtctcgcatcaggaggcaaggccaggacccgctgacccatgcctcctgccgcggtcagagcccaagtttgtcaaggtattttggatcccggagagcgagaacccagacgacgacaaaatctacttcttctttcgtgagacggcggtagaggcggcgccggcactgggacgcctgtccgtgtcccgcgttggccagatctgccgggtgaggagtccctgggccacacccggcgaccctgcccctacccctttgcctgccctggtctcgccctcatcccctttgatcgtcccggcagaacgacgtgggcggccagcgcagcctggtcaacaagtggacgacgttcctgaaggcgcggctggtgtgctcggtgcccggcgtcgagggcgacacccacttcgatcagctccgtgagtgcgggagtgggtatggggttggggaggggggcagcggcgcagactccgggagcccccgccgcagcggggctgtgcgccctaccccagctaggccccttccccgcagaggatgtgtttctgttgtcctcgcgggaccaccggaccccgctgctctatgccgtcttctccacgtccaggtgaggggcaggaggtagggagcgcccggggcgggccgctgggctccacccggcccctcacctcgccctggtcttcgcctccagcagcatcttccagggctctgcggtgtgcgtgtacagcatgaacgacgtgcgccgggccttcttgggaccctttgcacacaaggaggggcccatgcaccagtgggtgtcataccagggtcgcgtcccctacccgcggccaggcatggttcgtagcccagggacttctgctacaacccacttcaaagcctcaagggtttgagaacttggcctggggtcttcttggtgaatgtggtttcttcctttagttatgggtgggaaaacgtttccatcataagacaaggcttgtttcccgcctctgacttcctagggcaaggctgatctcctctctaattctcagggcagggttctgtccccatccccctccatgttcccagaggctgggcatggagggctgcctatcaagcccccatatctatatccctgctgtgcctccctttcccccacccccagtgccccagcaagacctttggcaccttcagttccaccaaggacttcccagacgatgtcatccagtttgcgcggaaccaccccctcatgtacaactctgtcctgcccactggggggcgccctcttttcctacaagttggagccaattacaccttcactcaaattgccgcggaccgggttgcagccgctgacggacactatgacgtcctcttcattggcacaggtcagggtccctccacagcgacccccaggctcccagccaggccctgtgggctgctgatggaagctctccctgttcagtcccatctccacatcctttcctgggctgtgtctccaccctgtggatgctgcccaacccacactcttccagtccacactcttcacaacccaaacatgctgagggtagacgcctcaaaggcgaggagacactagccccagctgtccgggagcaccaatggtcattaccccttctcatccctgcagacgttggcacggtgctgaaggtgatctcggtccccaagggcagtaggcccagcgcagaggggctgctcctggaggagctgcacgtgtttgaggtgaggcctcacccccagtcgcccgggacccccccaccccactaagccctgaccccgtcgcccctcctccctctcaggactcggccgctgtcaccagcatgcaaatttcttccaagagggtgagtgaccaggatgggggtcggggtgggatggactgagcttgtgcctggcgcgtcccaagcctctggccccttttggtagtttgcagtcccgggtttgagtacaggctctggctttgttagactgtgtgacctgaggcgtaagacctcagtgttcccatctgtcgagtggaagaagggatccctgaccgatgggaggcaggcgtggggtcgccctcggtcagcccagagcccctcgtgccccctagcaccagctgtacgtagcctcgcggagcgcggtggcccagatcgcgttgcaccgctgcgctgcccacggccgcgtctgcaccgaatgctgtctggcgcgtgacccctactgcgcctgggacggggtcgcgtgcacgcgcttccagcccagtgccaagaggtgggcggggtcggggttgggccgccgggagggaggcgaagggtctttcactgcccggggctgaaagaagggctcacagaagatcggatgttccccacaggcggttccggcggcaagacgtaaggaatggcgaccccagcacgttgtgctccggaggtgagtgccccagctgcccctaccctcagccccagaagacgccccacctgccctgccttgcctaaatctgactttcttctcgccccaagactcgtctcgtcccgcgctgctggaacacaaggtgttcggcgtggagggcagcagcgcctttctggagtgtgagccccgctcgctgcaggcgcgcgtggagtggactttccagcgcgcaggggtgacagcccacacccaggtgagccttactccgccctccccgccaggctcctgtcccaccccctgcatccaggagaggccccgccctacccaacgaagccccgtccaaccagacccactccccgccctgtccagtttggtccctcacctgcactccacaagctgctgaggccccattgcgtccaacggggctcccgacccgcctcccctgaatcaaggagaagacccgccctcgaccctcccattaaggtccctgaccaccccccaccaagttcatgtaaaccccgcctctttcggattctcccttgaagaccaccagctcccaaacactcagccttaaaatgtgcgcctgcgggcacccctttcccgctccacctcggctcccaatgactctttgcttcttccgtcgcgtgctagggcccggaagccctgttcccggcccgacacccccgcctcacgctgccctctgcccgcaggtgctggcagaggagcgcaccgagcgcaccgcccggggactactgctgcgcaggctgcggcgccgggactcgggcgtgtacttgtgcgccgccgtcgagcagggctttacgcaaccgctgcgtcgcctgtcgctgcacgtgttgagtgctacgcaggccgaacgactggcgcgggccgaggaggctgcgcccgccgcgccgccgggccccaaactctggtaccgggactttctgcagctggtggagccgggcggaggtggcagcgcgaactccctgcgcatgtgccgcccgcagcctgcgctgcagtcactgcccctggagtcgcggagaaagggccgtaaccggaggacccacgcccctgagcctcgcgctgagcgggggccgcgcagcgcaacgcactggtgaccagactgtccccacgccgggaaccaagcaggagacgacaggcgagagaggagccagacagaccctgaaaagaaggacgggttggggccgggcacattgggggtcaccggccgatggagacaccaaccgacaggccctggctgagggcagctgcgcgggcttatttattaacaggataacccttgaatgtagcagccccgggagggcggcacaggtcgggcgcaggattcagccggagggaagggacggggaagccgagctccagagcaacgaccagggccgaggaggtgcctggagtgcccaccctgggagacagaccccacctccttgggtagtgagcagtgagcagaaagctgtgaacaggctgggctgctggaggtggggcgaggcaggccgactgtactaaagtaacgcaataaacgcattatcagccaaagctggaatggccccagcagaaaa

SEQ ID NO: 13917 - DNA, 2221 bp, Homo sapiens
ctgatcctttggattcggtccgcgcagagcgccaactggacatggtgctagaggttgggtggtcagacactgtgatcccgggtgctgtgcccgcactacgggaaggggaagcagcgcgtgggtctcgcatcaggaggcaaggccaggacccgctgacccatgcctcctgccgcggtcagagcccaagtttgtcaaggtattttggatcccggagagcgagaacccagacgacgacaaaatctacttcttctttcgtgagacggcggtagaggcggcgccggcactgggacgcctgtccgtgtcccgcgttggccagatctgccggaacgacgtgggcggccagcgcagcctggtcaacaagtggacgacgttcctgaaggcgcggctggtgtgctcggtgcccggcgtcgagggcgacacccacttcgatcagctccaggatgtgtttctgttgtcctcgcgggaccaccggaccccgctgctctatgccgtcttctccacgtccagcatcttccagggctctgcggtgtgcgtgtacagcatgaacgacgtgcgccgggccttcttgggaccctttgcacacaaggaggggcccatgcaccagtgggtgtcataccagggtcgcgtcccctacccgcggccaggcatgtgccccagcaagacctttggcaccttcagttccaccaaggacttcccagacgatgtcatccagtttgcgcggaaccaccccctcatgtacaactctgtcctgcccactggggggcgccctcttttcctacaagttggagccaattacaccttcactcaaattgccgcggaccgggttgcagccgctgacggacactatgacgtcctcttcattggcacagacgttggcacggtgctgaaggtgatctcggtccccaagggcagtaggcccagcgcagaggggctgctcctggaggagctgcacgtgtttgaggactcggccgctgtcaccagcatgcaaatttcttccaagaggcaccagctgtacgtagcctcgcggagcgcggtggcccagatcgcgttgcaccgctgcgctgcccacggccgcgtctgcaccgaatgctgtctggcgcgtgacccctactgcgcctgggacggggtcgcgtgcacgcgcttccagcccagtgccaagaggcggttccggcggcaagacgtaaggaatggcgaccccagcacgttgtgctccggagactcgtctcgtcccgcgctgctggaacacaaggtgttcggcgtggagggcagcagcgcctttctggagtgtgagccccgctcgctgcaggcgcgcgtggagtggactttccagcgcgcaggggtgacagcccacacccaggtgctggcagaggagcgcaccgagcgcaccgcccggggactactgctgcgcaggctgcggcgccgggactcgggcgtgtacttgtgcgccgccgtcgagcagggctttacgcaaccgctgcgtcgcctgtcgctgcacgtgttgagtgctacgcaggccgaacgactggcgcgggccgaggaggctgcgcccgccgcgccgccgggccccaaactctggtaccgggactttctgcagctggtggagccgggcggaggtggcagcgcgaactccctgcgcatgtgccgcccgcagcctgcgctgcagtcactgcccctggagtcgcggagaaagggccgtaaccggaggacccacgcccctgagcctcgcgctgagcgggggccgcgcagcgcaacgcactggtgaccagactgtccccacgccgggaaccaagcaggagacgacaggcgagagaggagccagacagaccctgaaaagaaggacgggttggggccgggcacattgggggtcaccggccgatggagacaccaaccgacaggccctggctgagggcagctgcgcgggcttatttattaacaggataacccttgaatgtagcagccccgggagggcggcacaggtcgggcgcaggattcagccggagggaagggacggggaagccgagctccagagcaacgaccagggccgaggaggtgcctggagtgcccaccctgggagacagaccccacctccttgggtagtgagcagtgagcagaaagctgtgaacaggctgggctgctggaggtggggcgaggcaggccgactgtactaaagtaacgcaataaacgcattatcagccaaagctggaatggccccagcagaaaa

SEQ ID NO: 13918 - DNA, 7493 bp, Homo sapiens
gaaccctgagcaccctgagctgctgagatggggcgggccggggctgccgccgtgatcccgggcctggccctgctctgggcagtggggctggggagtgccgcccccagccccccacgccttcggctctccttccaaggtaggtgcacctggcaggcgggagggcccagcttgaggtgggcaggaaagggtccccgtatggccagggggctctgtgttggctgttgccccatgtgcgtgcctgtcaccagactctggtaggattagtgggcactctcaggccacctccagttaaccctgtccgggcctcagcccccagcctctgcccacattctcttcgtgctttctcaggaagacccctcctgtccccacagcaacagaccttgtctctgttccgttcagtacccccaacaaggcgatactccttcagcagagcaacagggaagtcagagcccccttctcatgcctcctgtataggagggtggcccctgggcagtggcagtgaataggcagttctgctgagctcaggctggtggtggagtggcaggaaaggaactctcagcctgacttttgggagttggggttctggccatccctgcatgccagtctcccccaggactctggtgtccataagccttgcctcccagtgcgcccgcctggagacaccacctgtctgagcatgcccaagttcaacctgccttcctcttcctggggggatgtaccacctaccctggcagctccacacgtgcacctgggtgggcttgggtttgcgtgtgtaaactcacacacatgtaaactcacatgtgtacaggccaggtcctaatggcaaccttggccgatagagtcaccaccaggcaggacctgggggaggcttccagcatggctggcgagtcatcagcagtgtcctgccctgcagagctccaggcctggcatggtctccagactttcagcctggagcgaacctgctgctaccaggccttgctggtggatgaggagcgtggacgcctgtttgtgggtgccgagaaccatgtggcctccctcaacctggacaacatcagcaagcgggccaagaaggtgccagggactcccaaccccagcactccccagggaaggagccctgggaccccactccagcctggagagacccagaggaatggctccctgaggtagagaatatcccaagttcctgacctgtgtcccctctcccccaacctcccgatagctggcctggccggcccctgtggaatggcgagaggagtgcaactgggcagggaaggacattggtgtgagtgccagctgcccgggccgggagtggggagggtcagcccctcaccccagagacagggcagggctaaaacagaggcctgcctgttctggctgggatgagggcagggaggtcgaggtggctgaggtctgggggtggtgagtcagggtgggggctcgtgtaattcttctggggtgcctctgagtcatgggaggctttgcaggcctgtgcttccccagacacccaccctcgtgaggcctgggctggtcagcaagggcccccaggtccctgtagcccatgttagtacttgcctgggctgatgccgaagagagggaggggtgaggatgccactggtgagctgggacctcttaaggctacgtccctgggggaagcctcacacctccaaccctactagactgagtgcatgaacttcgtgaagttgctgcatgcctacaaccgcacccatttgctggcctgtggcacgggagccttccacccaacctgtgcctttgtggaagtgggccaccgggcagaggtaaggccggatctaggcagggagggaggtcaggagggtaagaagggcctggtagtcacaacttgccacacctcccaggagcccgtcctccggctggacccaggaaggatagaggatggcaaggggaagagtccttatgaccccaggcatcgggctgcctccgtgctggtgggtgagtccaagggctaaggccccaagagaaccccttagaaactctagaacctcacaaagtcccaagacccccaagagctccagggaatcccccataacctcactcactcccagagctccccaggccctcctgccccaagagccctccatttgcctgagtggcccttgctctgtctgcaggggaggagctatactcaggggtggcagcagacctcatgggacgagactttaccatctttcgcagcctagggcaacgtccaagtctccgaacagagccacacgactcccgctggctcaatggtgagaggctggtggggttggtgggtagaggtcgtcaccctcccacagggcaggtgccaagcaaggcccataaagtaagtgagcagtgggtgtggccaggtcttaccaaataccctccttaatcaggcactggcgtcacagagacagacaagacaggtatgaccgtgacctctttgagttcacagatcacatacatgataagatcaagtccaatggccttgaggccagagagagacaagggaggaagggaaaaggagactgggtggctggagggggttgggtaaaggaagccgctgtgctgaggggagtatgagctaattcccaagcacaagacagctagccagcaaaatttagggatgagcattccaggcagagggagcattccaggcagagggagcaactagtgcaaaggcctggatgcaagaacaagcaaaggaatagacttgcagagctagcaatgaaaagggggcctggactgtcaggggccagagtcatttattctaagagtcatgggggctgggcacaatggcttgcacctgtaatcccagcactttgggaggctgaggcagacagattgcttgaagacaggagtttcataccagcctgggctacaaagcaagacaaaaaataaaataaaattagctgggggcagtggcatgcacacacctgtagtcctggctagtcaggaggctgagatggaaggatcacttgagcccaggagttggaggctgcagtgagccatgatgctgccactgcaggacagagcagaccctgtctctaaatcaaataaaaattaaataagggctatgggctggtgggcacagtggctcacacctgtaatctcagcactttgggaggcggaggcaggcaaatcgcttgaggccaggagtttgagactagcctggccaacatggtgaaaccctgtctctactaaaaaatacaaaaattggccgggtgcagtggtgtgcacctgtaatcccagcactttgggaggctgaggcgggcggatcacctgagttcaggcatttgagaccagcctggccaacatggtgtaaccccgtctctactaaatatacaaaaattagtccggcatgatggtgtgcatctgtaatcccagctactcaggaggctgaggcaggagaatcgcttgaacctaggaggcggaggttgcagtgaatggagactgtgccactgcattccagcctgggcaatagagcgagacttcgtctcaaaaaaaaaaaaaaaagccaggtgtggtggtaggctctgactgtaatctcagctacttgggaggctgaggttgcagtgagccgagatcgagcactccagcctgggcgacagagcgagactgtctcaaaaaataaataaataaacaaataataataataataataataataaagagcaatgggacccagcagaaggatttgaagcaggagtggggagcatctggttatgctagagaggaagattcatgagtgaaggtgaaaccagattacctcatctccctcctaccccagcctaaggtgctgggcgacgtgtggggcgagatcggaggctagccgggcttcacgcctgcgcccccaggtagccacggtctctgctgccccctcgcggctgcttcttgcctcgcaggccctgatcctttggattcggtccgcgcagagcgccaactggacatggtgctagaggttgggtggtcagacactgtgatcccgggtgctgtgcccgcactacgggaaggggaagcagcgcgtgggtctcgcatcaggaggcaaggccaggacccgctgacccatgcctcctgccgcggtcagagcccaagtttgtcaaggtattttggatcccggagagcgagaacccagacgacgacaaaatctacttcttctttcgtgagacggcggtagaggcggcgccggcactgggacgcctgtccgtgtcccgcgttggccagatctgccgggtgaggagtccctgggccacacccggcgaccctgcccctacccctttgcctgccctggtctcgccctcatcccctttgatcgtcccggcagaacgacgtgggcggccagcgcagcctggtcaacaagtggacgacgttcctgaaggcgcggctggtgtgctcggtgcccggcgtcgagggcgacacccacttcgatcagctccgtgagtgcgggagtgggtatggggttggggaggggggcagcggcgcagactccgggagcccccgccgcagcggggctgtgcgccctaccccagctaggccccttccccgcagaggatgtgtttctgttgtcctcgcgggaccaccggaccccgctgctctatgccgtcttctccacgtccaggtgaggggcaggaggtagggagcgcccggggcgggccgctgggctccacccggcccctcacctcgccctggtcttcgcctccagcagcatcttccagggctctgcggtgtgcgtgtacagcatgaacgacgtgcgccgggccttcttgggaccctttgcacacaaggaggggcccatgcaccagtgggtgtcataccagggtcgcgtcccctacccgcggccaggcatggttcgtagcccagggacttctgctacaacccacttcaaagcctcaagggtttgagaacttggcctggggtcttcttggtgaatgtggtttcttcctttagttatgggtgggaaaacgtttccatcataagacaaggcttgtttcccgcctctgacttcctagggcaaggctgatctcctctctaattctcagggcagggttctgtccccatccccctccatgttcccagaggctgggcatggagggctgcctatcaagcccccatatctatatccctgctgtgcctccctttcccccacccccagtgccccagcaagacctttggcaccttcagttccaccaaggacttcccagacgatgtcatccagtttgcgcggaaccaccccctcatgtacaactctgtcctgcccactggggggcgccctcttttcctacaagttggagccaattacaccttcactcaaattgccgcggaccgggttgcagccgctgacggacactatgacgtcctcttcattggcacaggtcagggtccctccacagcgacccccaggctcccagccaggccctgtgggctgctgatggaagctctccctgttcagtcccatctccacatcctttcctgggctgtgtctccaccctgtggatgctgcccaacccacactcttccagtccacactcttcacaacccaaacatgctgagggtagacgcctcaaaggcgaggagacactagccccagctgtccgggagcaccaatggtcattaccccttctcatccctgcagacgttggcacggtgctgaaggtgatctcggtccccaagggcagtaggcccagcgcagaggggctgctcctggaggagctgcacgtgtttgaggtgaggcctcacccccagtcgcccgggacccccccaccccactaagccctgaccccgtcgcccctcctccctctcaggactcggccgctgtcaccagcatgcaaatttcttccaagagggtgagtgaccaggatgggggtcggggtgggatggactgagcttgtgcctggcgcgtcccaagcctctggccccttttggtagtttgcagtcccgggtttgagtacaggctctggctttgttagactgtgtgacctgaggcgtaagacctcagtgttcccatctgtcgagtggaagaagggatccctgaccgatgggaggcaggcgtggggtcgccctcggtcagcccagagcccctcgtgccccctagcaccagctgtacgtagcctcgcggagcgcggtggcccagatcgcgttgcaccgctgcgctgcccacggccgcgtctgcaccgaatgctgtctggcgcgtgacccctactgcgcctgggacggggtcgcgtgcacgcgcttccagcccagtgccaagaggtgggcggggtcggggttgggccgccgggagggaggcgaagggtctttcactgcccggggctgaaagaagggctcacagaagatcggatgttccccacaggcggttccggcggcaagacgtaaggaatggcgaccccagcacgttgtgctccggaggtgagtgccccagctgcccctaccctcagccccagaagacgccccacctgccctgccttgcctaaatctgactttcttctcgccccaagactcgtctcgtcccgcgctgctggaacacaaggtgttcggcgtggagggcagcagcgcctttctggagtgtgagccccgctcgctgcaggcgcgcgtggagtggactttccagcgcgcaggggtgacagcccacacccaggtgagccttactccgccctccccgccaggctcctgtcccaccccctgcatccaggagaggccccgccctacccaacgaagccccgtccaaccagacccactccccgccctgtccagtttggtccctcacctgcactccacaagctgctgaggccccattgcgtccaacggggctcccgacccgcctcccctgaatcaaggagaagacccgccctcgaccctcccattaaggtccctgaccaccccccaccaagttcatgtaaaccccgcctctttcggattctcccttgaagaccaccagctcccaaacactcagccttaaaatgtgcgcctgcgggcacccctttcccgctccacctcggctcccaatgactctttgcttcttccgtcgcgtgctagggcccggaagccctgttcccggcccgacacccccgcctcacgctgccctctgcccgcaggtgctggcagaggagcgcaccgagcgcaccgcccggggactactgctgcgcaggctgcggcgccgggactcgggcgtgtacttgtgcgccgccgtcgagcagggctttacgcaaccgctgcgtcgcctgtcgctgcacgtgttgagtgctacgcaggccgaacgactggcgcgggccgaggaggctgcgcccgccgcgccgccgggccccaaactctggtaccgggactttctgcagctggtggagccgggcggaggtggcagcgcgaactccctgcgcatgtgccgcccgcagcctgcgctgcagtcactgcccctggagtcgcggagaaagggccgtaaccggaggacccacgcccctgagcctcgcgctgagcgggggccgcgcagcgcaacgcactggtga

SEQ ID NO: 13919 - DNA, 2292 bp, Homo sapiens
gaaccctgagcaccctgagctgctgagatggggcgggccggggctgccgccgtgatcccgggcctggccctgctctgggcagtggggctggggagtgccgcccccagccccccacgccttcggctctccttccaagagctccaggcctggcatggtctccagactttcagcctggagcgaacctgctgctaccaggccttgctggtggatgaggagcgtggacgcctgtttgtgggtgccgagaaccatgtggcctccctcaacctggacaacatcagcaagcgggccaagaagctggcctggccggcccctgtggaatggcgagaggagtgcaactgggcagggaaggacattggtactgagtgcatgaacttcgtgaagttgctgcatgcctacaaccgcacccatttgctggcctgtggcacgggagccttccacccaacctgtgcctttgtggaagtgggccaccgggcagaggagcccgtcctccggctggacccaggaaggatagaggatggcaaggggaagagtccttatgaccccaggcatcgggctgcctccgtgctggtgggggaggagctatactcaggggtggcagcagacctcatgggacgagactttaccatctttcgcagcctagggcaacgtccaagtctccgaacagagccacacgactcccgctggctcaatgagcccaagtttgtcaaggtattttggatcccggagagcgagaacccagacgacgacaaaatctacttcttctttcgtgagacggcggtagaggcggcgccggcactgggacgcctgtccgtgtcccgcgttggccagatctgccggaacgacgtgggcggccagcgcagcctggtcaacaagtggacgacgttcctgaaggcgcggctggtgtgctcggtgcccggcgtcgagggcgacacccacttcgatcagctccgccccttccccgcagaggatgtgtttctgttgtcctcgcgggaccaccggaccccgctgctctatgccgtcttctccacgtccagcagcatcttccagggctctgcggtgtgcgtgtacagcatgaacgacgtgcgccgggccttcttgggaccctttgcacacaaggaggggcccatgcaccagtgggtgtcataccagggtcgcgtcccctacccgcggccaggcatgtgccccagcaagacctttggcaccttcagttccaccaaggacttcccagacgatgtcatccagtttgcgcggaaccaccccctcatgtacaactctgtcctgcccactggggggcgccctcttttcctacaagttggagccaattacaccttcactcaaattgccgcggaccgggttgcagccgctgacggacactatgacgtcctcttcattggcacagacgttggcacggtgctgaaggtgatctcggtccccaagggcagtaggcccagcgcagaggggctgctcctggaggagctgcacgtgtttgaggactcggccgctgtcaccagcatgcaaatttcttccaagaggcaccagctgtacgtagcctcgcggagcgcggtggcccagatcgcgttgcaccgctgcgctgcccacggccgcgtctgcaccgaatgctgtctggcgcgtgacccctactgcgcctgggacggggtcgcgtgcacgcgcttccagcccagtgccaagaggcggttccggcggcaagacgtaaggaatggcgaccccagcacgttgtgctccggagactcgtctcgtcccgcgctgctggaacacaaggtgttcggcgtggagggcagcagcgcctttctggagtgtgagccccgctcgctgcaggcgcgcgtggagtggactttccagcgcgcaggggtgacagcccacacccaggtgctggcagaggagcgcaccgagcgcaccgcccggggactactgctgcgcaggctgcggcgccgggactcgggcgtgtacttgtgcgccgccgtcgagcagggctttacgcaaccgctgcgtcgcctgtcgctgcacgtgttgagtgctacgcaggccgaacgactggcgcgggccgaggaggctgcgcccgccgcgccgccgggccccaaactctggtaccgggactttctgcagctggtggagccgggcggaggtggcagcgcgaactccctgcgcatgtgccgcccgcagcctgcgctgcagtcactgcccctggagtcgcggagaaagggccgtaaccggaggacccacgcccctgagcctcgcgctgagcgggggccgcgcagcgcaacgcactggtga

SEQ ID NO: 13920 - DNA, 4516 bp, Homo sapiens
tggggcagagtccagggcagctcaaggctcctccacacacacacccgctgaaccctgagcaccctgagctgctgagatggggcgggccggggctgccgccgtgatcccgggcctggccctgctctgggcagtggggctggggagtgccgcccccagccccccacgccttcggctctccttccaaggtaggtgcacctggcaggcgggagggcccagcttgaggtgggcaggaaagggtccccgtatggccagggggctctgtgttggctgttgccccatgtgcgtgcctgtcaccagactctggtaggattagtgggcactctcaggccacctccagttaaccctgtccgggcctcagcccccagcctctgcccacattctcttcgtgctttctcaggaagacccctcctgtccccacagcaacagaccttgtctctgttccgttcagtacccccaacaaggcgatactccttcagcagagcaacagggaagtcagagcccccttctcatgcctcctgtataggagggtggcccctgggcagtggcagtgaataggcagttctgctgagctcaggctggtggtggagtggcaggaaaggaactctcagcctgacttttgggagttggggttctggccatccctgcatgccagtctcccccaggactctggtgtccataagccttgcctcccagtgcgcccgcctggagacaccacctgtctgagcatgcccaagttcaacctgccttcctcttcctggggggatgtaccacctaccctggcagctccacacgtgcacctgggtgggcttgggtttgcgtgtgtaaactcacacacatgtaaactcacatgtgtacaggccaggtcctaatggcaaccttggccgatagagtcaccaccaggcaggacctgggggaggcttccagcatggctggcgagtcatcagcagtgtcctgccctgcagagctccaggcctggcatggtctccagactttcagcctggagcgaacctgctgctaccaggccttgctggtggatgaggagcgtggacgcctgtttgtgggtgccgagaaccatgtggcctccctcaacctggacaacatcagcaagcgggccaagaaggtgccagggactcccaaccccagcactccccagggaaggagccctgggaccccactccagcctggagagacccagaggaatggctccctgaggtagagaatatcccaagttcctgacctgtgtcccctctcccccaacctcccgatagctggcctggccggcccctgtggaatggcgagaggagtgcaactgggcagggaaggacattggtgtgagtgccagctgcccgggccgggagtggggagggtcagcccctcaccccagagacagggcagggctaaaacagaggcctgcctgttctggctgggatgagggcagggaggtcgaggtggctgaggtctgggggtggtgagtcagggtgggggctcgtgtaattcttctggggtgcctctgagtcatgggaggctttgcaggcctgtgcttccccagacacccaccctcgtgaggcctgggctggtcagcaagggcccccaggtccctgtagcccatgttagtacttgcctgggctgatgccgaagagagggaggggtgaggatgccactggtgagctgggacctcttaaggctacgtccctgggggaagcctcacacctccaaccctactagactgagtgcatgaacttcgtgaagttgctgcatgcctacaaccgcacccatttgctggcctgtggcacgggagccttccacccaacctgtgcctttgtggaagtgggccaccgggcagaggtaaggccggatctaggcagggagggaggtcaggagggtaagaagggcctggtagtcacaacttgccacacctcccaggagcccgtcctccggctggacccaggaaggatagaggatggcaaggggaagagtccttatgaccccaggcatcgggctgcctccgtgctggtgggtgagtccaagggctaaggccccaagagaaccccttagaaactctagaacctcacaaagtcccaagacccccaagagctccagggaatcccccataacctcactcactcccagagctccccaggccctcctgccccaagagccctccatttgcctgagtggcccttgctctgtctgcaggggaggagctatactcaggggtggcagcagacctcatgggacgagactttaccatctttcgcagcctagggcaacgtccaagtctccgaacagagccacacgactcccgctggctcaatggtgagaggctggtggggttggtgggtagaggtcgtcaccctcccacagggcaggtgccaagcaaggcccataaagtaagtgagcagtgggtgtggccaggtcttaccaaataccctccttaatcaggcactggcgtcacagagacagacaagacaggtatgaccgtgacctctttgagttcacagatcacatacatgataagatcaagtccaatggccttgaggccagagagagacaagggaggaagggaaaaggagactgggtggctggagggggttgggtaaaggaagccgctgtgctgaggggagtatgagctaattcccaagcacaagacagctagccagcaaaatttagggatgagcattccaggcagagggagcattccaggcagagggagcaactagtgcaaaggcctggatgcaagaacaagcaaaggaatagacttgcagagctagcaatgaaaagggggcctggactgtcaggggccagagtcatttattctaagagtcatgggggctgggcacaatggcttgcacctgtaatcccagcactttgggaggctgaggcagacagattgcttgaagacaggagtttcataccagcctgggctacaaagcaagacaaaaaataaaataaaattagctgggggcagtggcatgcacacacctgtagtcctggctagtcaggaggctgagatggaaggatcacttgagcccaggagttggaggctgcagtgagccatgatgctgccactgcaggacagagcagaccctgtctctaaatcaaataaaaattaaataagggctatgggctggtgggcacagtggctcacacctgtaatctcagcactttgggaggcggaggcaggcaaatcgcttgaggccaggagtttgagactagcctggccaacatggtgaaaccctgtctctactaaaaaatacaaaaattggccgggtgcagtggtgtgcacctgtaatcccagcactttgggaggctgaggcgggcggatcacctgagttcaggcatttgagaccagcctggccaacatggtgtaaccccgtctctactaaatatacaaaaattagtccggcatgatggtgtgcatctgtaatcccagctactcaggaggctgaggcaggagaatcgcttgaacctaggaggcggaggttgcagtgaatggagactgtgccactgcattccagcctgggcaatagagcgagacttcgtctcaaaaaaaaaaaaaaaagccaggtgtggtggtaggctctgactgtaatctcagctacttgggaggctgaggttgcagtgagccgagatcgagcactccagcctgggcgacagagcgagactgtctcaaaaaataaataaataaacaaataataataataataataataataaagagcaatgggacccagcagaaggatttgaagcaggagtggggagcatctggttatgctagagaggaagattcatgagtgaaggtgaaaccagattacctcatctccctcctaccccagcctaaggtgctgggcgacgtgtggggcgagatcggaggctagccgggcttcacgcctgcgcccccaggtagccacggtctctgctgccccctcgcggctgcttcttgcctcgcaggccctgatcctttggattcggtccgcgcagagcgccaactggacatggtgctagaggttgggtggtcagacactgtgatcccgggtgctgtgcccgcactacgggaaggggaagcagcgcgtgggtctcgcatcaggaggcaaggccaggacccgctgacccatgcctcctgccgcggtcagagcccaagtttgtcaaggtattttggatcccggagagcgagaacccagacgacgacaaaatctacttcttctttcgtgagacggcggtagaggcggcgccggcactgggacgcctgtccgtgtcccgcgttggccagatctgccgggtgaggagtccctgggccacacccggcgaccctgcccctacccctttgcctgccctggtctcgccctcatcccctttgatcgtcccggcagaacgacgtgggcggccagcgcagcctggtcaacaagtggacgacgttcctgaaggcgcggctggtgtgctcggtgcccggcgtcgagggcgacacccacttcgatcagctccgtgagtgcgggagtgggtatggggttggggaggg

SEQ ID NO: 13921 - DNA, 1061 bp, Homo sapiens
tggggcagagtccagggcagctcaaggctcctccacacacacacccgctgaaccctgagcaccctgagctgctgagatggggcgggccggggctgccgccgtgatcccgggcctggccctgctctgggcagtggggctggggagtgccgcccccagccccccacgccttcggctctccttccaagagctccaggcctggcatggtctccagactttcagcctggagcgaacctgctgctaccaggccttgctggtggatgaggagcgtggacgcctgtttgtgggtgccgagaaccatgtggcctccctcaacctggacaacatcagcaagcgggccaagaaggtgccagggactcccaaccccagcactccccagggaaggagccctgggaccccactccagcctggagagacccagaggaatggctccctgagactgagtgcatgaacttcgtgaagttgctgcatgcctacaaccgcacccatttgctggcctgtggcacgggagccttccacccaacctgtgcctttgtggaagtgggccaccgggcagaggagcccgtcctccggctggacccaggaaggatagaggatggcaaggggaagagtccttatgaccccaggcatcgggctgcctccgtgctggtgggggaggagctatactcaggggtggcagcagacctcatgggacgagactttaccatctttcgcagcctagggcaacgtccaagtctccgaacagagccacacgactcccgctggctcaatgagcccaagtttgtcaaggtattttggatcccggagagcgagaacccagacgacgacaaaatctacttcttctttcgtgagacggcggtagaggcggcgccggcactgggacgcctgtccgtgtcccgcgttggccagatctgccggaacgacgtgggcggccagcgcagcctggtcaacaagtggacgacgttcctgaaggcgcggctggtgtgctcggtgcccggcgtcgagggcgacacccacttcgatcagctccgtgagtgcgggagtgggtatggggttggggaggg

SEQ ID NO: 13922 - DNA, 8400 bp, Homo sapiens
gactcctcttccagatcctggggcagagtccagggcagctcaaggctcctccacacacacacccgctgaaccctgagcaccctgagctgctgagatggggcgggccggggctgccgccgtgatcccgggcctggccctgctctgggcagtggggctggggagtgccgcccccagccccccacgccttcggctctccttccaaggtaggtgcacctggcaggcgggagggcccagcttgaggtgggcaggaaagggtccccgtatggccagggggctctgtgttggctgttgccccatgtgcgtgcctgtcaccagactctggtaggattagtgggcactctcaggccacctccagttaaccctgtccgggcctcagcccccagcctctgcccacattctcttcgtgctttctcaggaagacccctcctgtccccacagcaacagaccttgtctctgttccgttcagtacccccaacaaggcgatactccttcagcagagcaacagggaagtcagagcccccttctcatgcctcctgtataggagggtggcccctgggcagtggcagtgaataggcagttctgctgagctcaggctggtggtggagtggcaggaaaggaactctcagcctgacttttgggagttggggttctggccatccctgcatgccagtctcccccaggactctggtgtccataagccttgcctcccagtgcgcccgcctggagacaccacctgtctgagcatgcccaagttcaacctgccttcctcttcctggggggatgtaccacctaccctggcagctccacacgtgcacctgggtgggcttgggtttgcgtgtgtaaactcacacacatgtaaactcacatgtgtacaggccaggtcctaatggcaaccttggccgatagagtcaccaccaggcaggacctgggggaggcttccagcatggctggcgagtcatcagcagtgtcctgccctgcagagctccaggcctggcatggtctccagactttcagcctggagcgaacctgctgctaccaggccttgctggtggatgaggagcgtggacgcctgtttgtgggtgccgagaaccatgtggcctccctcaacctggacaacatcagcaagcgggccaagaaggtgccagggactcccaaccccagcactccccagggaaggagccctgggaccccactccagcctggagagacccagaggaatggctccctgaggtagagaatatcccaagttcctgacctgtgtcccctctcccccaacctcccgatagctggcctggccggcccctgtggaatggcgagaggagtgcaactgggcagggaaggacattggtgtgagtgccagctgcccgggccgggagtggggagggtcagcccctcaccccagagacagggcagggctaaaacagaggcctgcctgttctggctgggatgagggcagggaggtcgaggtggctgaggtctgggggtggtgagtcagggtgggggctcgtgtaattcttctggggtgcctctgagtcatgggaggctttgcaggcctgtgcttccccagacacccaccctcgtgaggcctgggctggtcagcaagggcccccaggtccctgtagcccatgttagtacttgcctgggctgatgccgaagagagggaggggtgaggatgccactggtgagctgggacctcttaaggctacgtccctgggggaagcctcacacctccaaccctactagactgagtgcatgaacttcgtgaagttgctgcatgcctacaaccgcacccatttgctggcctgtggcacgggagccttccacccaacctgtgcctttgtggaagtgggccaccgggcagaggtaaggccggatctaggcagggagggaggtcaggagggtaagaagggcctggtagtcacaacttgccacacctcccaggagcccgtcctccggctggacccaggaaggatagaggatggcaaggggaagagtccttatgaccccaggcatcgggctgcctccgtgctggtgggtgagtccaagggctaaggccccaagagaaccccttagaaactctagaacctcacaaagtcccaagacccccaagagctccagggaatcccccataacctcactcactcccagagctccccaggccctcctgccccaagagccctccatttgcctgagtggcccttgctctgtctgcaggggaggagctatactcaggggtggcagcagacctcatgggacgagactttaccatctttcgcagcctagggcaacgtccaagtctccgaacagagccacacgactcccgctggctcaatggtgagaggctggtggggttggtgggtagaggtcgtcaccctcccacagggcaggtgccaagcaaggcccataaagtaagtgagcagtgggtgtggccaggtcttaccaaataccctccttaatcaggcactggcgtcacagagacagacaagacaggtatgaccgtgacctctttgagttcacagatcacatacatgataagatcaagtccaatggccttgaggccagagagagacaagggaggaagggaaaaggagactgggtggctggagggggttgggtaaaggaagccgctgtgctgaggggagtatgagctaattcccaagcacaagacagctagccagcaaaatttagggatgagcattccaggcagagggagcattccaggcagagggagcaactagtgcaaaggcctggatgcaagaacaagcaaaggaatagacttgcagagctagcaatgaaaagggggcctggactgtcaggggccagagtcatttattctaagagtcatgggggctgggcacaatggcttgcacctgtaatcccagcactttgggaggctgaggcagacagattgcttgaagacaggagtttcataccagcctgggctacaaagcaagacaaaaaataaaataaaattagctgggggcagtggcatgcacacacctgtagtcctggctagtcaggaggctgagatggaaggatcacttgagcccaggagttggaggctgcagtgagccatgatgctgccactgcaggacagagcagaccctgtctctaaatcaaataaaaattaaataagggctatgggctggtgggcacagtggctcacacctgtaatctcagcactttgggaggcggaggcaggcaaatcgcttgaggccaggagtttgagactagcctggccaacatggtgaaaccctgtctctactaaaaaatacaaaaattggccgggtgcagtggtgtgcacctgtaatcccagcactttgggaggctgaggcgggcggatcacctgagttcaggcatttgagaccagcctggccaacatggtgtaaccccgtctctactaaatatacaaaaattagtccggcatgatggtgtgcatctgtaatcccagctactcaggaggctgaggcaggagaatcgcttgaacctaggaggcggaggttgcagtgaatggagactgtgccactgcattccagcctgggcaatagagcgagacttcgtctcaaaaaaaaaaaaaaaagccaggtgtggtggtaggctctgactgtaatctcagctacttgggaggctgaggttgcagtgagccgagatcgagcactccagcctgggcgacagagcgagactgtctcaaaaaataaataaataaacaaataataataataataataataataaagagcaatgggacccagcagaaggatttgaagcaggagtggggagcatctggttatgctagagaggaagattcatgagtgaaggtgaaaccagattacctcatctccctcctaccccagcctaaggtgctgggcgacgtgtggggcgagatcggaggctagccgggcttcacgcctgcgcccccaggtagccacggtctctgctgccccctcgcggctgcttcttgcctcgcaggccctgatcctttggattcggtccgcgcagagcgccaactggacatggtgctagaggttgggtggtcagacactgtgatcccgggtgctgtgcccgcactacgggaaggggaagcagcgcgtgggtctcgcatcaggaggcaaggccaggacccgctgacccatgcctcctgccgcggtcagagcccaagtttgtcaaggtattttggatcccggagagcgagaacccagacgacgacaaaatctacttcttctttcgtgagacggcggtagaggcggcgccggcactgggacgcctgtccgtgtcccgcgttggccagatctgccgggtgaggagtccctgggccacacccggcgaccctgcccctacccctttgcctgccctggtctcgccctcatcccctttgatcgtcccggcagaacgacgtgggcggccagcgcagcctggtcaacaagtggacgacgttcctgaaggcgcggctggtgtgctcggtgcccggcgtcgagggcgacacccacttcgatcagctccgtgagtgcgggagtgggtatggggttggggaggggggcagcggcgcagactccgggagcccccgccgcagcggggctgtgcgccctaccccagctaggccccttccccgcagaggatgtgtttctgttgtcctcgcgggaccaccggaccccgctgctctatgccgtcttctccacgtccaggtgaggggcaggaggtagggagcgcccggggcgggccgctgggctccacccggcccctcacctcgccctggtcttcgcctccagcagcatcttccagggctctgcggtgtgcgtgtacagcatgaacgacgtgcgccgggccttcttgggaccctttgcacacaaggaggggcccatgcaccagtgggtgtcataccagggtcgcgtcccctacccgcggccaggcatggttcgtagcccagggacttctgctacaacccacttcaaagcctcaagggtttgagaacttggcctggggtcttcttggtgaatgtggtttcttcctttagttatgggtgggaaaacgtttccatcataagacaaggcttgtttcccgcctctgacttcctagggcaaggctgatctcctctctaattctcagggcagggttctgtccccatccccctccatgttcccagaggctgggcatggagggctgcctatcaagcccccatatctatatccctgctgtgcctccctttcccccacccccagtgccccagcaagacctttggcaccttcagttccaccaaggacttcccagacgatgtcatccagtttgcgcggaaccaccccctcatgtacaactctgtcctgcccactggggggcgccctcttttcctacaagttggagccaattacaccttcactcaaattgccgcggaccgggttgcagccgctgacggacactatgacgtcctcttcattggcacaggtcagggtccctccacagcgacccccaggctcccagccaggccctgtgggctgctgatggaagctctccctgttcagtcccatctccacatcctttcctgggctgtgtctccaccctgtggatgctgcccaacccacactcttccagtccacactcttcacaacccaaacatgctgagggtagacgcctcaaaggcgaggagacactagccccagctgtccgggagcaccaatggtcattaccccttctcatccctgcagacgttggcacggtgctgaaggtgatctcggtccccaagggcagtaggcccagcgcagaggggctgctcctggaggagctgcacgtgtttgaggtgaggcctcacccccagtcgcccgggacccccccaccccactaagccctgaccccgtcgcccctcctccctctcaggactcggccgctgtcaccagcatgcaaatttcttccaagagggtgagtgaccaggatgggggtcggggtgggatggactgagcttgtgcctggcgcgtcccaagcctctggccccttttggtagtttgcagtcccgggtttgagtacaggctctggctttgttagactgtgtgacctgaggcgtaagacctcagtgttcccatctgtcgagtggaagaagggatccctgaccgatgggaggcaggcgtggggtcgccctcggtcagcccagagcccctcgtgccccctagcaccagctgtacgtagcctcgcggagcgcggtggcccagatcgcgttgcaccgctgcgctgcccacggccgcgtctgcaccgaatgctgtctggcgcgtgacccctactgcgcctgggacggggtcgcgtgcacgcgcttccagcccagtgccaagaggtgggcggggtcggggttgggccgccgggagggaggcgaagggtctttcactgcccggggctgaaagaagggctcacagaagatcggatgttccccacaggcggttccggcggcaagacgtaaggaatggcgaccccagcacgttgtgctccggaggtgagtgccccagctgcccctaccctcagccccagaagacgccccacctgccctgccttgcctaaatctgactttcttctcgccccaagactcgtctcgtcccgcgctgctggaacacaaggtgttcggcgtggagggcagcagcgcctttctggagtgtgagccccgctcgctgcaggcgcgcgtggagtggactttccagcgcgcaggggtgacagcccacacccaggtgagccttactccgccctccccgccaggctcctgtcccaccccctgcatccaggagaggccccgccctacccaacgaagccccgtccaaccagacccactccccgccctgtccagtttggtccctcacctgcactccacaagctgctgaggccccattgcgtccaacggggctcccgacccgcctcccctgaatcaaggagaagacccgccctcgaccctcccattaaggtccctgaccaccccccaccaagttcatgtaaaccccgcctctttcggattctcccttgaagaccaccagctcccaaacactcagccttaaaatgtgcgcctgcgggcacccctttcccgctccacctcggctcccaatgactctttgcttcttccgtcgcgtgctagggcccggaagccctgttcccggcccgacacccccgcctcacgctgccctctgcccgcaggtgctggcagaggagcgcaccgagcgcaccgcccggggactactgctgcgcaggctgcggcgccgggactcgggcgtgtacttgtgcgccgccgtcgagcagggctttacgcaaccgctgcgtcgcctgtcgctgcacgtgttgagtgctacgcaggccgaacgactggcgcgggccgaggaggctgcgcccgccgcgccgccgggccccaaactctggtaccgggactttctgcagctggtggagccgggcggaggtggcagcgcgaactccctgcgcatgtgccgcccgcagcctgcgctgcagtcactgcccctggagtcgcggagaaagggccgtaaccggaggacccacgcccctgagcctcgcgctgagcgggggccgcgcagcgcaacgcactggtgaccagactgtccccacgccgggaaccaagcaggagacgacaggcgagagaggagccagacagaccctgaaaagaaggacgggttggggccgggcacattgggggtcaccggccgatggagacaccaaccgacaggccctggctgagggcagctgcgcgggcttatttattaacaggataacccttgaatgtagcagccccgggagggcggcacaggtcgggcgcaggattcagccggagggaagggacggggaagccgagctccagagcaacgaccagggccgaggaggtgcctggagtgcccaccctgggagacagaccccacctccttgggtagtgagcagtgagcagaaagctgtgaacaggctgggctgctggaggtggggcgaggcaggccgactgtactaaagtaacgcaataaacgcattatcagccaaagctggaatggccccagcagaaaaccccagtcctcggccttgctatgtggtcttgggcaccttactagcggtgtcagggcccgagtttctcctgtccaaggttgcctggtgaggattaaaggtggttccggccaggcgcggtggctcacgcctgtaatcccaacactttcggaggcccaggcggacggatcacgaggtcaggagatggaaaccatcccggctaacacggtgaaaccccgtctgtactaaaaatacaaaaaattagtcgggcgtggtggcgggcgcctgtaatcctagctactcaggaggctgaggcaggagaattgcttgaacctgggaggtggaggttgcaatgagcctagatctcgccgctgcactccagcctgggcgacagagcgagactcc

SEQ ID NO: 13923 - DNA, 3184 bp, Homo sapiens
gactcctcttccagatcctggggcagagtccagggcagctcaaggctcctccacacacacacccgctgaaccctgagcaccctgagctgctgagatggggcgggccggggctgccgccgtgatcccgggcctggccctgctctgggcagtggggctggggagtgccgcccccagccccccacgccttcggctctccttccaagagctccaggcctggcatggtctccagactttcagcctggagcgaacctgctgctaccaggccttgctggtggatgaggagcgtggacgcctgtttgtgggtgccgagaaccatgtggcctccctcaacctggacaacatcagcaagcgggccaagaagctggcctggccggcccctgtggaatggcgagaggagtgcaactgggcagggaaggacattggtactgagtgcatgaacttcgtgaagttgctgcatgcctacaaccgcacccatttgctggcctgtggcacgggagccttccacccaacctgtgcctttgtggaagtgggccaccgggcagaggagcccgtcctccggctggacccaggaaggatagaggatggcaaggggaagagtccttatgaccccaggcatcgggctgcctccgtgctggtgggggaggagctatactcaggggtggcagcagacctcatgggacgagactttaccatctttcgcagcctagggcaacgtccaagtctccgaacagagccacacgactcccgctggctcaatgagcccaagtttgtcaaggtattttggatcccggagagcgagaacccagacgacgacaaaatctacttcttctttcgtgagacggcggtagaggcggcgccggcactgggacgcctgtccgtgtcccgcgttggccagatctgccggaacgacgtgggcggccagcgcagcctggtcaacaagtggacgacgttcctgaaggcgcggctggtgtgctcggtgcccggcgtcgagggcgacacccacttcgatcagctccaggatgtgtttctgttgtcctcgcgggaccaccggaccccgctgctctatgccgtcttctccacgtccagcagcatcttccagggctctgcggtgtgcgtgtacagcatgaacgacgtgcgccgggccttcttgggaccctttgcacacaaggaggggcccatgcaccagtgggtgtcataccagggtcgcgtcccctacccgcggccaggcatgtgccccagcaagacctttggcaccttcagttccaccaaggacttcccagacgatgtcatccagtttgcgcggaaccaccccctcatgtacaactctgtcctgcccactggggggcgccctcttttcctacaagttggagccaattacaccttcactcaaattgccgcggaccgggttgcagccgctgacggacactatgacgtcctcttcattggcacagacgttggcacggtgctgaaggtgatctcggtccccaagggcagtaggcccagcgcagaggggctgctcctggaggagctgcacgtgtttgaggactcggccgctgtcaccagcatgcaaatttcttccaagaggcaccagctgtacgtagcctcgcggagcgcggtggcccagatcgcgttgcaccgctgcgctgcccacggccgcgtctgcaccgaatgctgtctggcgcgtgacccctactgcgcctgggacggggtcgcgtgcacgcgcttccagcccagtgccaagaggcggttccggcggcaagacgtaaggaatggcgaccccagcacgttgtgctccggagactcgtctcgtcccgcgctgctggaacacaaggtgttcggcgtggagggcagcagcgcctttctggagtgtgagccccgctcgctgcaggcgcgcgtggagtggactttccagcgcgcaggggtgacagcccacacccaggtgctggcagaggagcgcaccgagcgcaccgcccggggactactgctgcgcaggctgcggcgccgggactcgggcgtgtacttgtgcgccgccgtcgagcagggctttacgcaaccgctgcgtcgcctgtcgctgcacgtgttgagtgctacgcaggccgaacgactggcgcgggccgaggaggctgcgcccgccgcgccgccgggccccaaactctggtaccgggactttctgcagctggtggagccgggcggaggtggcagcgcgaactccctgcgcatgtgccgcccgcagcctgcgctgcagtcactgcccctggagtcgcggagaaagggccgtaaccggaggacccacgcccctgagcctcgcgctgagcgggggccgcgcagcgcaacgcactggtgaccagactgtccccacgccgggaaccaagcaggagacgacaggcgagagaggagccagacagaccctgaaaagaaggacgggttggggccgggcacattgggggtcaccggccgatggagacaccaaccgacaggccctggctgagggcagctgcgcgggcttatttattaacaggataacccttgaatgtagcagccccgggagggcggcacaggtcgggcgcaggattcagccggagggaagggacggggaagccgagctccagagcaacgaccagggccgaggaggtgcctggagtgcccaccctgggagacagaccccacctccttgggtagtgagcagtgagcagaaagctgtgaacaggctgggctgctggaggtggggcgaggcaggccgactgtactaaagtaacgcaataaacgcattatcagccaaagctggaatggccccagcagaaaaccccagtcctcggccttgctatgtggtcttgggcaccttactagcggtgtcagggcccgagtttctcctgtccaaggttgcctggtgaggattaaaggtggttccggccaggcgcggtggctcacgcctgtaatcccaacactttcggaggcccaggcggacggatcacgaggtcaggagatggaaaccatcccggctaacacggtgaaaccccgtctgtactaaaaatacaaaaaattagtcgggcgtggtggcgggcgcctgtaatcctagctactcaggaggctgaggcaggagaattgcttgaacctgggaggtggaggttgcaatgagcctagatctcgccgctgcactccagcctgggcgacagagcgagactcc

SEQ ID NO: 13924 - DNA, 9532 bp, Homo sapiens
gggcgggggctgcttcttaaaggagccgtcagagggtccccagcggccccagggtgggaaggggccagagtggagagatgctgctgcggaagtcctcggtggagtgtgagaaggcagccagtgttggcctggaagacctctagaacctgagaagaggcagcggcaagtgtcagcggagggaaggagggaggtgggggtcctggcctgggatggggccaggagctgggcaggagtgtgggtggaggggcctggaacctgcctcagcagctgctccacttgcttaatcccacctggaaccttgtcccactccctgggctcctgtgtccagcacctgcccagctgacccctgggaaggagggtgggcatagcagccaggtctttgccccagctgagggccagggggaggtgtctggctcctagagtgaaggggctcaaagatggggaagaactcaaggggtgagagaagtgaagggagaggctcagagaggctgtggaggcgttgagagggaaggccagctcagcgaggccaggaggctggggtgcaaatgaagggctgcctcaccttgcccctctttgattcctcaggggtgtggagagagagccctcaagctcaaatgcagaggctgcttcagctgggttgggagcagtccccaagtcagaggctgaggcttctgcccaggtcttgggtctcctgggtagcacttctccctctgaggaatggagtgattgatgctgcagttggatttgctcacttgcatgcccagagacatgtctattcttatgggtgcacacgtttgcacatgcacaaatgtgcaacacatctgtgtgcaaaatatgcacatatcacacatatgtactgcatggattgcacagtgccacatgtgtgtgcacaccaacccatatccacacatgtgcaatatgacacactatatatttgcacatagatgtgcacacacatgcacatacacactacacacatgcgcacatcacaaggggacactcggaaacacattcacaggcacccacacccttggctccagcctcaaaagtgtctctgtgtttttctgcgggactgtggggacactgccacctccagaggcctgaccccctcctgtcactctcactcttttgactggcttgttttgctcattgcacttggcaccctctgcatccatctgattccttgttggcactctgtcccctttcacatggggaccttgtctatgtctcccagtatccctcctcccaggtctaggctggcatgaagtgggtggcacattgtgaattaatgtctgtgagtgtgtatacaagagaggagattactgggaagggtgacgtggtgaggcgggcttgccagtgcagggtgaccctgagggtgtgcccagtggcgtgggtgtgtctgtgattgtggccaggcggggcaccctcggaggggagggttcggaagtggaatgcgaccccccagcctctttcccctaggggctgtaatctgatccctggggactccccccctagcctcccgccctcgccctcactgctgactcctcttccagatcctggggcagagtccagggcagctcaaggctcctccacacacacacccgctgaaccctgagcaccctgagctgctgagatggggcgggccggggctgccgccgtgatcccgggcctggccctgctctgggcagtggggctggggagtgccgcccccagccccccacgccttcggctctccttccaaggtaggtgcacctggcaggcgggagggcccagcttgaggtgggcaggaaagggtccccgtatggccagggggctctgtgttggctgttgccccatgtgcgtgcctgtcaccagactctggtaggattagtgggcactctcaggccacctccagttaaccctgtccgggcctcagcccccagcctctgcccacattctcttcgtgctttctcaggaagacccctcctgtccccacagcaacagaccttgtctctgttccgttcagtacccccaacaaggcgatactccttcagcagagcaacagggaagtcagagcccccttctcatgcctcctgtataggagggtggcccctgggcagtggcagtgaataggcagttctgctgagctcaggctggtggtggagtggcaggaaaggaactctcagcctgacttttgggagttggggttctggccatccctgcatgccagtctcccccaggactctggtgtccataagccttgcctcccagtgcgcccgcctggagacaccacctgtctgagcatgcccaagttcaacctgccttcctcttcctggggggatgtaccacctaccctggcagctccacacgtgcacctgggtgggcttgggtttgcgtgtgtaaactcacacacatgtaaactcacatgtgtacaggccaggtcctaatggcaaccttggccgatagagtcaccaccaggcaggacctgggggaggcttccagcatggctggcgagtcatcagcagtgtcctgccctgcagagctccaggcctggcatggtctccagactttcagcctggagcgaacctgctgctaccaggccttgctggtggatgaggagcgtggacgcctgtttgtgggtgccgagaaccatgtggcctccctcaacctggacaacatcagcaagcgggccaagaaggtgccagggactcccaaccccagcactccccagggaaggagccctgggaccccactccagcctggagagacccagaggaatggctccctgaggtagagaatatcccaagttcctgacctgtgtcccctctcccccaacctcccgatagctggcctggccggcccctgtggaatggcgagaggagtgcaactgggcagggaaggacattggtgtgagtgccagctgcccgggccgggagtggggagggtcagcccctcaccccagagacagggcagggctaaaacagaggcctgcctgttctggctgggatgagggcagggaggtcgaggtggctgaggtctgggggtggtgagtcagggtgggggctcgtgtaattcttctggggtgcctctgagtcatgggaggctttgcaggcctgtgcttccccagacacccaccctcgtgaggcctgggctggtcagcaagggcccccaggtccctgtagcccatgttagtacttgcctgggctgatgccgaagagagggaggggtgaggatgccactggtgagctgggacctcttaaggctacgtccctgggggaagcctcacacctccaaccctactagactgagtgcatgaacttcgtgaagttgctgcatgcctacaaccgcacccatttgctggcctgtggcacgggagccttccacccaacctgtgcctttgtggaagtgggccaccgggcagaggtaaggccggatctaggcagggagggaggtcaggagggtaagaagggcctggtagtcacaacttgccacacctcccaggagcccgtcctccggctggacccaggaaggatagaggatggcaaggggaagagtccttatgaccccaggcatcgggctgcctccgtgctggtgggtgagtccaagggctaaggccccaagagaaccccttagaaactctagaacctcacaaagtcccaagacccccaagagctccagggaatcccccataacctcactcactcccagagctccccaggccctcctgccccaagagccctccatttgcctgagtggcccttgctctgtctgcaggggaggagctatactcaggggtggcagcagacctcatgggacgagactttaccatctttcgcagcctagggcaacgtccaagtctccgaacagagccacacgactcccgctggctcaatggtgagaggctggtggggttggtgggtagaggtcgtcaccctcccacagggcaggtgccaagcaaggcccataaagtaagtgagcagtgggtgtggccaggtcttaccaaataccctccttaatcaggcactggcgtcacagagacagacaagacaggtatgaccgtgacctctttgagttcacagatcacatacatgataagatcaagtccaatggccttgaggccagagagagacaagggaggaagggaaaaggagactgggtggctggagggggttgggtaaaggaagccgctgtgctgaggggagtatgagctaattcccaagcacaagacagctagccagcaaaatttagggatgagcattccaggcagagggagcattccaggcagagggagcaactagtgcaaaggcctggatgcaagaacaagcaaaggaatagacttgcagagctagcaatgaaaagggggcctggactgtcaggggccagagtcatttattctaagagtcatgggggctgggcacaatggcttgcacctgtaatcccagcactttgggaggctgaggcagacagattgcttgaagacaggagtttcataccagcctgggctacaaagcaagacaaaaaataaaataaaattagctgggggcagtggcatgcacacacctgtagtcctggctagtcaggaggctgagatggaaggatcacttgagcccaggagttggaggctgcagtgagccatgatgctgccactgcaggacagagcagaccctgtctctaaatcaaataaaaattaaataagggctatgggctggtgggcacagtggctcacacctgtaatctcagcactttgggaggcggaggcaggcaaatcgcttgaggccaggagtttgagactagcctggccaacatggtgaaaccctgtctctactaaaaaatacaaaaattggccgggtgcagtggtgtgcacctgtaatcccagcactttgggaggctgaggcgggcggatcacctgagttcaggcatttgagaccagcctggccaacatggtgtaaccccgtctctactaaatatacaaaaattagtccggcatgatggtgtgcatctgtaatcccagctactcaggaggctgaggcaggagaatcgcttgaacctaggaggcggaggttgcagtgaatggagactgtgccactgcattccagcctgggcaatagagcgagacttcgtctcaaaaaaaaaaaaaaaagccaggtgtggtggtaggctctgactgtaatctcagctacttgggaggctgaggttgcagtgagccgagatcgagcactccagcctgggcgacagagcgagactgtctcaaaaaataaataaataaacaaataataataataataataataataaagagcaatgggacccagcagaaggatttgaagcaggagtggggagcatctggttatgctagagaggaagattcatgagtgaaggtgaaaccagattacctcatctccctcctaccccagcctaaggtgctgggcgacgtgtggggcgagatcggaggctagccgggcttcacgcctgcgcccccaggtagccacggtctctgctgccccctcgcggctgcttcttgcctcgcaggccctgatcctttggattcggtccgcgcagagcgccaactggacatggtgctagaggttgggtggtcagacactgtgatcccgggtgctgtgcccgcactacgggaaggggaagcagcgcgtgggtctcgcatcaggaggcaaggccaggacccgctgacccatgcctcctgccgcggtcagagcccaagtttgtcaaggtattttggatcccggagagcgagaacccagacgacgacaaaatctacttcttctttcgtgagacggcggtagaggcggcgccggcactgggacgcctgtccgtgtcccgcgttggccagatctgccgggtgaggagtccctgggccacacccggcgaccctgcccctacccctttgcctgccctggtctcgccctcatcccctttgatcgtcccggcagaacgacgtgggcggccagcgcagcctggtcaacaagtggacgacgttcctgaaggcgcggctggtgtgctcggtgcccggcgtcgagggcgacacccacttcgatcagctccgtgagtgcgggagtgggtatggggttggggaggggggcagcggcgcagactccgggagcccccgccgcagcggggctgtgcgccctaccccagctaggccccttccccgcagaggatgtgtttctgttgtcctcgcgggaccaccggaccccgctgctctatgccgtcttctccacgtccaggtgaggggcaggaggtagggagcgcccggggcgggccgctgggctccacccggcccctcacctcgccctggtcttcgcctccagcagcatcttccagggctctgcggtgtgcgtgtacagcatgaacgacgtgcgccgggccttcttgggaccctttgcacacaaggaggggcccatgcaccagtgggtgtcataccagggtcgcgtcccctacccgcggccaggcatggttcgtagcccagggacttctgctacaacccacttcaaagcctcaagggtttgagaacttggcctggggtcttcttggtgaatgtggtttcttcctttagttatgggtgggaaaacgtttccatcataagacaaggcttgtttcccgcctctgacttcctagggcaaggctgatctcctctctaattctcagggcagggttctgtccccatccccctccatgttcccagaggctgggcatggagggctgcctatcaagcccccatatctatatccctgctgtgcctccctttcccccacccccagtgccccagcaagacctttggcaccttcagttccaccaaggacttcccagacgatgtcatccagtttgcgcggaaccaccccctcatgtacaactctgtcctgcccactggggggcgccctcttttcctacaagttggagccaattacaccttcactcaaattgccgcggaccgggttgcagccgctgacggacactatgacgtcctcttcattggcacaggtcagggtccctccacagcgacccccaggctcccagccaggccctgtgggctgctgatggaagctctccctgttcagtcccatctccacatcctttcctgggctgtgtctccaccctgtggatgctgcccaacccacactcttccagtccacactcttcacaacccaaacatgctgagggtagacgcctcaaaggcgaggagacactagccccagctgtccgggagcaccaatggtcattaccccttctcatccctgcagacgttggcacggtgctgaaggtgatctcggtccccaagggcagtaggcccagcgcagaggggctgctcctggaggagctgcacgtgtttgaggtgaggcctcacccccagtcgcccgggacccccccaccccactaagccctgaccccgtcgcccctcctccctctcaggactcggccgctgtcaccagcatgcaaatttcttccaagagggtgagtgaccaggatgggggtcggggtgggatggactgagcttgtgcctggcgcgtcccaagcctctggccccttttggtagtttgcagtcccgggtttgagtacaggctctggctttgttagactgtgtgacctgaggcgtaagacctcagtgttcccatctgtcgagtggaagaagggatccctgaccgatgggaggcaggcgtggggtcgccctcggtcagcccagagcccctcgtgccccctagcaccagctgtacgtagcctcgcggagcgcggtggcccagatcgcgttgcaccgctgcgctgcccacggccgcgtctgcaccgaatgctgtctggcgcgtgacccctactgcgcctgggacggggtcgcgtgcacgcgcttccagcccagtgccaagaggtgggcggggtcggggttgggccgccgggagggaggcgaagggtctttcactgcccggggctgaaagaagggctcacagaagatcggatgttccccacaggcggttccggcggcaagacgtaaggaatggcgaccccagcacgttgtgctccggaggtgagtgccccagctgcccctaccctcagccccagaagacgccccacctgccctgccttgcctaaatctgactttcttctcgccccaagactcgtctcgtcccgcgctgctggaacacaaggtgttcggcgtggagggcagcagcgcctttctggagtgtgagccccgctcgctgcaggcgcgcgtggagtggactttccagcgcgcaggggtgacagcccacacccaggtgagccttactccgccctccccgccaggctcctgtcccaccccctgcatccaggagaggccccgccctacccaacgaagccccgtccaaccagacccactccccgccctgtccagtttggtccctcacctgcactccacaagctgctgaggccccattgcgtccaacggggctcccgacccgcctcccctgaatcaaggagaagacccgccctcgaccctcccattaaggtccctgaccaccccccaccaagttcatgtaaaccccgcctctttcggattctcccttgaagaccaccagctcccaaacactcagccttaaaatgtgcgcctgcgggcacccctttcccgctccacctcggctcccaatgactctttgcttcttccgtcgcgtgctagggcccggaagccctgttcccggcccgacacccccgcctcacgctgccctctgcccgcaggtgctggcagaggagcgcaccgagcgcaccgcccggggactactgctgcgcaggctgcggcgccgggactcgggcgtgtacttgtgcgccgccgtcgagcagggctttacgcaaccgctgcgtcgcctgtcgctgcacgtgttgagtgctacgcaggccgaacgactggcgcgggccgaggaggctgcgcccgccgcgccgccgggccccaaactctggtaccgggactttctgcagctggtggagccgggcggaggtggcagcgcgaactccctgcgcatgtgccgcccgcagcctgcgctgcagtcactgcccctggagtcgcggagaaagggccgtaaccggaggacccacgcccctgagcctcgcgctgagcgggggccgcgcagcgcaacgcactggtgaccagactgtccccacgccgggaaccaagcaggagacgacaggcgagagaggagccagacagaccctgaaaagaaggacgggttggggccgggcacattgggggtcaccggccgatggagacaccaaccgacaggccctggctgagggcagctgcgcgggcttatttattaacaggataacccttgaatgtagcagccccgggagggcggcacaggtcgggcgcaggattcagccggagggaagggacggggaagccgagctccagagcaacgaccagggccgaggaggtgcctggagtgcccaccctgggagacagaccccacctccttgggtagtgagcagtgagcagaaagctgtgaacaggctgggctgctggaggtggggcgaggcaggccgactgtactaaagtaacgcaataaacgcattatcagcc

SEQ ID NO: 13925 - DNA, 2925 bp, Homo sapiens
gggcgggggctgcttcttaaaggagccgtcagagggtccccagcggccccagggtgggaaggggccagagtggagagatgctgctgcggaagtcctcggtggagtgtgagaaggcagccagtgttggcctggaagacctctagaacctgagaagaggcagcgatcctggggcagagtccagggcagctcaaggctcctccacacacacacccgctgaaccctgagcaccctgagctgctgagatggggcgggccggggctgccgccgtgatcccgggcctggccctgctctgggcagtggggctggggagtgccgcccccagccccccacgccttcggctctccttccaagagctccaggcctggcatggtctccagactttcagcctggagcgaacctgctgctaccaggccttgctggtggatgaggagcgtggacgcctgtttgtgggtgccgagaaccatgtggcctccctcaacctggacaacatcagcaagcgggccaagaagctggcctggccggcccctgtggaatggcgagaggagtgcaactgggcagggaaggacattggtactgagtgcatgaacttcgtgaagttgctgcatgcctacaaccgcacccatttgctggcctgtggcacgggagccttccacccaacctgtgcctttgtggaagtgggccaccgggcagaggagcccgtcctccggctggacccaggaaggatagaggatggcaaggggaagagtccttatgaccccaggcatcgggctgcctccgtgctggtgggggaggagctatactcaggggtggcagcagacctcatgggacgagactttaccatctttcgcagcctagggcaacgtccaagtctccgaacagagccacacgactcccgctggctcaatgagcccaagtttgtcaaggtattttggatcccggagagcgagaacccagacgacgacaaaatctacttcttctttcgtgagacggcggtagaggcggcgccggcactgggacgcctgtccgtgtcccgcgttggccagatctgccggaacgacgtgggcggccagcgcagcctggtcaacaagtggacgacgttcctgaaggcgcggctggtgtgctcggtgcccggcgtcgagggcgacacccacttcgatcagctccaggatgtgtttctgttgtcctcgcgggaccaccggaccccgctgctctatgccgtcttctccacgtccagcagcatcttccagggctctgcggtgtgcgtgtacagcatgaacgacgtgcgccgggccttcttgggaccctttgcacacaaggaggggcccatgcaccagtgggtgtcataccagggtcgcgtcccctacccgcggccaggcatgtgccccagcaagacctttggcaccttcagttccaccaaggacttcccagacgatgtcatccagtttgcgcggaaccaccccctcatgtacaactctgtcctgcccactggggggcgccctcttttcctacaagttggagccaattacaccttcactcaaattgccgcggaccgggttgcagccgctgacggacactatgacgtcctcttcattggcacagacgttggcacggtgctgaaggtgatctcggtccccaagggcagtaggcccagcgcagaggggctgctcctggaggagctgcacgtgtttgaggactcggccgctgtcaccagcatgcaaatttcttccaagaggcaccagctgtacgtagcctcgcggagcgcggtggcccagatcgcgttgcaccgctgcgctgcccacggccgcgtctgcaccgaatgctgtctggcgcgtgacccctactgcgcctgggacggggtcgcgtgcacgcgcttccagcccagtgccaagaggcggttccggcggcaagacgtaaggaatggcgaccccagcacgttgtgctccggagactcgtctcgtcccgcgctgctggaacacaaggtgttcggcgtggagggcagcagcgcctttctggagtgtgagccccgctcgctgcaggcgcgcgtggagtggactttccagcgcgcaggggtgacagcccacacccaggtgctggcagaggagcgcaccgagcgcaccgcccggggactactgctgcgcaggctgcggcgccgggactcgggcgtgtacttgtgcgccgccgtcgagcagggctttacgcaaccgctgcgtcgcctgtcgctgcacgtgttgagtgctacgcaggccgaacgactggcgcgggccgaggaggctgcgcccgccgcgccgccgggccccaaactctggtaccgggactttctgcagctggtggagccgggcggaggtggcagcgcgaactccctgcgcatgtgccgcccgcagcctgcgctgcagtcactgcccctggagtcgcggagaaagggccgtaaccggaggacccacgcccctgagcctcgcgctgagcgggggccgcgcagcgcaacgcactggtgaccagactgtccccacgccgggaaccaagcaggagacgacaggcgagagaggagccagacagaccctgaaaagaaggacgggttggggccgggcacattgggggtcaccggccgatggagacaccaaccgacaggccctggctgagggcagctgcgcgggcttatttattaacaggataacccttgaatgtagcagccccgggagggcggcacaggtcgggcgcaggattcagccggagggaagggacggggaagccgagctccagagcaacgaccagggccgaggaggtgcctggagtgcccaccctgggagacagaccccacctccttgggtagtgagcagtgagcagaaagctgtgaacaggctgggctgctggaggtggggcgaggcaggccgactgtactaaagtaacgcaataaacgcattatcagcc

SEQ ID NO: 13926 - DNA, 8266 bp, Homo sapiens
gtgggtggcacattgtgaattaatgtctgtgagtgtgtatacaagagaggagattactgggaagggtgacgtggtgaggcgggcttgccagtgcagggtgaccctgagggtgtgcccagtggcgtgggtgtgtctgtgattgtggccaggcggggcaccctcggaggggagggttcggaagtggaatgcgaccccccagcctctttcccctaggggctgtaatctgatccctggggactccccccctagcctcccgccctcgccctcactgctgactcctcttccagatcctggggcagagtccagggcagctcaaggctcctccacacacacacccgctgaaccctgagcaccctgagctgctgagatggggcgggccggggctgccgccgtgatcccgggcctggccctgctctgggcagtggggctggggagtgccgcccccagccccccacgccttcggctctccttccaaggtaggtgcacctggcaggcgggagggcccagcttgaggtgggcaggaaagggtccccgtatggccagggggctctgtgttggctgttgccccatgtgcgtgcctgtcaccagactctggtaggattagtgggcactctcaggccacctccagttaaccctgtccgggcctcagcccccagcctctgcccacattctcttcgtgctttctcaggaagacccctcctgtccccacagcaacagaccttgtctctgttccgttcagtacccccaacaaggcgatactccttcagcagagcaacagggaagtcagagcccccttctcatgcctcctgtataggagggtggcccctgggcagtggcagtgaataggcagttctgctgagctcaggctggtggtggagtggcaggaaaggaactctcagcctgacttttgggagttggggttctggccatccctgcatgccagtctcccccaggactctggtgtccataagccttgcctcccagtgcgcccgcctggagacaccacctgtctgagcatgcccaagttcaacctgccttcctcttcctggggggatgtaccacctaccctggcagctccacacgtgcacctgggtgggcttgggtttgcgtgtgtaaactcacacacatgtaaactcacatgtgtacaggccaggtcctaatggcaaccttggccgatagagtcaccaccaggcaggacctgggggaggcttccagcatggctggcgagtcatcagcagtgtcctgccctgcagagctccaggcctggcatggtctccagactttcagcctggagcgaacctgctgctaccaggccttgctggtggatgaggagcgtggacgcctgtttgtgggtgccgagaaccatgtggcctccctcaacctggacaacatcagcaagcgggccaagaaggtgccagggactcccaaccccagcactccccagggaaggagccctgggaccccactccagcctggagagacccagaggaatggctccctgaggtagagaatatcccaagttcctgacctgtgtcccctctcccccaacctcccgatagctggcctggccggcccctgtggaatggcgagaggagtgcaactgggcagggaaggacattggtgtgagtgccagctgcccgggccgggagtggggagggtcagcccctcaccccagagacagggcagggctaaaacagaggcctgcctgttctggctgggatgagggcagggaggtcgaggtggctgaggtctgggggtggtgagtcagggtgggggctcgtgtaattcttctggggtgcctctgagtcatgggaggctttgcaggcctgtgcttccccagacacccaccctcgtgaggcctgggctggtcagcaagggcccccaggtccctgtagcccatgttagtacttgcctgggctgatgccgaagagagggaggggtgaggatgccactggtgagctgggacctcttaaggctacgtccctgggggaagcctcacacctccaaccctactagactgagtgcatgaacttcgtgaagttgctgcatgcctacaaccgcacccatttgctggcctgtggcacgggagccttccacccaacctgtgcctttgtggaagtgggccaccgggcagaggtaaggccggatctaggcagggagggaggtcaggagggtaagaagggcctggtagtcacaacttgccacacctcccaggagcccgtcctccggctggacccaggaaggatagaggatggcaaggggaagagtccttatgaccccaggcatcgggctgcctccgtgctggtgggtgagtccaagggctaaggccccaagagaaccccttagaaactctagaacctcacaaagtcccaagacccccaagagctccagggaatcccccataacctcactcactcccagagctccccaggccctcctgccccaagagccctccatttgcctgagtggcccttgctctgtctgcaggggaggagctatactcaggggtggcagcagacctcatgggacgagactttaccatctttcgcagcctagggcaacgtccaagtctccgaacagagccacacgactcccgctggctcaatggtgagaggctggtggggttggtgggtagaggtcgtcaccctcccacagggcaggtgccaagcaaggcccataaagtaagtgagcagtgggtgtggccaggtcttaccaaataccctccttaatcaggcactggcgtcacagagacagacaagacaggtatgaccgtgacctctttgagttcacagatcacatacatgataagatcaagtccaatggccttgaggccagagagagacaagggaggaagggaaaaggagactgggtggctggagggggttgggtaaaggaagccgctgtgctgaggggagtatgagctaattcccaagcacaagacagctagccagcaaaatttagggatgagcattccaggcagagggagcattccaggcagagggagcaactagtgcaaaggcctggatgcaagaacaagcaaaggaatagacttgcagagctagcaatgaaaagggggcctggactgtcaggggccagagtcatttattctaagagtcatgggggctgggcacaatggcttgcacctgtaatcccagcactttgggaggctgaggcagacagattgcttgaagacaggagtttcataccagcctgggctacaaagcaagacaaaaaataaaataaaattagctgggggcagtggcatgcacacacctgtagtcctggctagtcaggaggctgagatggaaggatcacttgagcccaggagttggaggctgcagtgagccatgatgctgccactgcaggacagagcagaccctgtctctaaatcaaataaaaattaaataagggctatgggctggtgggcacagtggctcacacctgtaatctcagcactttgggaggcggaggcaggcaaatcgcttgaggccaggagtttgagactagcctggccaacatggtgaaaccctgtctctactaaaaaatacaaaaattggccgggtgcagtggtgtgcacctgtaatcccagcactttgggaggctgaggcgggcggatcacctgagttcaggcatttgagaccagcctggccaacatggtgtaaccccgtctctactaaatatacaaaaattagtccggcatgatggtgtgcatctgtaatcccagctactcaggaggctgaggcaggagaatcgcttgaacctaggaggcggaggttgcagtgaatggagactgtgccactgcattccagcctgggcaatagagcgagacttcgtctcaaaaaaaaaaaaaaaagccaggtgtggtggtaggctctgactgtaatctcagctacttgggaggctgaggttgcagtgagccgagatcgagcactccagcctgggcgacagagcgagactgtctcaaaaaataaataaataaacaaataataataataataataataataaagagcaatgggacccagcagaaggatttgaagcaggagtggggagcatctggttatgctagagaggaagattcatgagtgaaggtgaaaccagattacctcatctccctcctaccccagcctaaggtgctgggcgacgtgtggggcgagatcggaggctagccgggcttcacgcctgcgcccccaggtagccacggtctctgctgccccctcgcggctgcttcttgcctcgcaggccctgatcctttggattcggtccgcgcagagcgccaactggacatggtgctagaggttgggtggtcagacactgtgatcccgggtgctgtgcccgcactacgggaaggggaagcagcgcgtgggtctcgcatcaggaggcaaggccaggacccgctgacccatgcctcctgccgcggtcagagcccaagtttgtcaaggtattttggatcccggagagcgagaacccagacgacgacaaaatctacttcttctttcgtgagacggcggtagaggcggcgccggcactgggacgcctgtccgtgtcccgcgttggccagatctgccgggtgaggagtccctgggccacacccggcgaccctgcccctacccctttgcctgccctggtctcgccctcatcccctttgatcgtcccggcagaacgacgtgggcggccagcgcagcctggtcaacaagtggacgacgttcctgaaggcgcggctggtgtgctcggtgcccggcgtcgagggcgacacccacttcgatcagctccgtgagtgcgggagtgggtatggggttggggaggggggcagcggcgcagactccgggagcccccgccgcagcggggctgtgcgccctaccccagctaggccccttccccgcagaggatgtgtttctgttgtcctcgcgggaccaccggaccccgctgctctatgccgtcttctccacgtccaggtgaggggcaggaggtagggagcgcccggggcgggccgctgggctccacccggcccctcacctcgccctggtcttcgcctccagcagcatcttccagggctctgcggtgtgcgtgtacagcatgaacgacgtgcgccgggccttcttgggaccctttgcacacaaggaggggcccatgcaccagtgggtgtcataccagggtcgcgtcccctacccgcggccaggcatggttcgtagcccagggacttctgctacaacccacttcaaagcctcaagggtttgagaacttggcctggggtcttcttggtgaatgtggtttcttcctttagttatgggtgggaaaacgtttccatcataagacaaggcttgtttcccgcctctgacttcctagggcaaggctgatctcctctctaattctcagggcagggttctgtccccatccccctccatgttcccagaggctgggcatggagggctgcctatcaagcccccatatctatatccctgctgtgcctccctttcccccacccccagtgccccagcaagacctttggcaccttcagttccaccaaggacttcccagacgatgtcatccagtttgcgcggaaccaccccctcatgtacaactctgtcctgcccactggggggcgccctcttttcctacaagttggagccaattacaccttcactcaaattgccgcggaccgggttgcagccgctgacggacactatgacgtcctcttcattggcacaggtcagggtccctccacagcgacccccaggctcccagccaggccctgtgggctgctgatggaagctctccctgttcagtcccatctccacatcctttcctgggctgtgtctccaccctgtggatgctgcccaacccacactcttccagtccacactcttcacaacccaaacatgctgagggtagacgcctcaaaggcgaggagacactagccccagctgtccgggagcaccaatggtcattaccccttctcatccctgcagacgttggcacggtgctgaaggtgatctcggtccccaagggcagtaggcccagcgcagaggggctgctcctggaggagctgcacgtgtttgaggtgaggcctcacccccagtcgcccgggacccccccaccccactaagccctgaccccgtcgcccctcctccctctcaggactcggccgctgtcaccagcatgcaaatttcttccaagagggtgagtgaccaggatgggggtcggggtgggatggactgagcttgtgcctggcgcgtcccaagcctctggccccttttggtagtttgcagtcccgggtttgagtacaggctctggctttgttagactgtgtgacctgaggcgtaagacctcagtgttcccatctgtcgagtggaagaagggatccctgaccgatgggaggcaggcgtggggtcgccctcggtcagcccagagcccctcgtgccccctagcaccagctgtacgtagcctcgcggagcgcggtggcccagatcgcgttgcaccgctgcgctgcccacggccgcgtctgcaccgaatgctgtctggcgcgtgacccctactgcgcctgggacggggtcgcgtgcacgcgcttccagcccagtgccaagaggtgggcggggtcggggttgggccgccgggagggaggcgaagggtctttcactgcccggggctgaaagaagggctcacagaagatcggatgttccccacaggcggttccggcggcaagacgtaaggaatggcgaccccagcacgttgtgctccggaggtgagtgccccagctgcccctaccctcagccccagaagacgccccacctgccctgccttgcctaaatctgactttcttctcgccccaagactcgtctcgtcccgcgctgctggaacacaaggtgttcggcgtggagggcagcagcgcctttctggagtgtgagccccgctcgctgcaggcgcgcgtggagtggactttccagcgcgcaggggtgacagcccacacccaggtgagccttactccgccctccccgccaggctcctgtcccaccccctgcatccaggagaggccccgccctacccaacgaagccccgtccaaccagacccactccccgccctgtccagtttggtccctcacctgcactccacaagctgctgaggccccattgcgtccaacggggctcccgacccgcctcccctgaatcaaggagaagacccgccctcgaccctcccattaaggtccctgaccaccccccaccaagttcatgtaaaccccgcctctttcggattctcccttgaagaccaccagctcccaaacactcagccttaaaatgtgcgcctgcgggcacccctttcccgctccacctcggctcccaatgactctttgcttcttccgtcgcgtgctagggcccggaagccctgttcccggcccgacacccccgcctcacgctgccctctgcccgcaggtgctggcagaggagcgcaccgagcgcaccgcccggggactactgctgcgcaggctgcggcgccgggactcgggcgtgtacttgtgcgccgccgtcgagcagggctttacgcaaccgctgcgtcgcctgtcgctgcacgtgttgagtgctacgcaggccgaacgactggcgcgggccgaggaggctgcgcccgccgcgccgccgggccccaaactctggtaccgggactttctgcagctggtggagccgggcggaggtggcagcgcgaactccctgcgcatgtgccgcccgcagcctgcgctgcagtcactgcccctggagtcgcggagaaagggccgtaaccggaggacccacgcccctgagcctcgcgctgagcgggggccgcgcagcgcaacgcactggtgaccagactgtccccacgccgggaaccaagcaggagacgacaggcgagagaggagccagacagaccctgaaaagaaggacgggttggggccgggcacattgggggtcaccggccgatggagacaccaaccgacaggccctggctgagggcagctgcgcgggcttatttattaacaggataacccttgaatgtagcagccccgggagggcggcacaggtcgggcgcaggattcagccggagggaagggacggggaagccgagctccagagcaacgaccagggccgaggaggtgcctggagtgcccaccctgggagacagaccccacctccttgggtagtgagcagtgagcagaaagctgtgaacaggctgggctgctggaggtggggcgaggcaggccgactgtactaaagtaacgcaataaacgcattatcagcc

SEQ ID NO: 13927 - DNA, 3158 bp, Homo sapiens
gtgggtggcacattgtgaattaatgtctgtgagtgtgtatacaagagaggagattactgggaagggtgacgtggtgaggcgggcttgccagtgcagggtgaccctgagggtgtgcccagtggcgtgggtgtgtctgtgattgtggccaggcggggcaccctcggaggggagggttcggaagtggaatgcgaccccccagcctctttcccctaggggctgtaatctgatccctggggactccccccctagcctcccgccctcgccctcactgctgactcctcttccagatcctggggcagagtccagggcagctcaaggctcctccacacacacacccgctgaaccctgagcaccctgagctgctgagatggggcgggccggggctgccgccgtgatcccgggcctggccctgctctgggcagtggggctggggagtgccgcccccagccccccacgccttcggctctccttccaagagctccaggcctggcatggtctccagactttcagcctggagcgaacctgctgctaccaggccttgctggtggatgaggagcgtggacgcctgtttgtgggtgccgagaaccatgtggcctccctcaacctggacaacatcagcaagcgggccaagaagctggcctggccggcccctgtggaatggcgagaggagtgcaactgggcagggaaggacattggtactgagtgcatgaacttcgtgaagttgctgcatgcctacaaccgcacccatttgctggcctgtggcacgggagccttccacccaacctgtgcctttgtggaagtgggccaccgggcagaggagcccgtcctccggctggacccaggaaggatagaggatggcaaggggaagagtccttatgaccccaggcatcgggctgcctccgtgctggggaggagctatactcaggggtggcagcagacctcatgggacgagactttaccatctttcgcagcctagggcaacgtccaagtctccgaacagagccacacgactcccgctggctcaatgagcccaagtttgtcaaggtattttggatcccggagagcgagaacccagacgacgacaaaatctacttcttctttcgtgagacggcggtagaggcggcgccggcactgggacgcctgtccgtgtcccgcgttggccagatctgccggaacgacgtgggcggccagcgcagcctggtcaacaagtggacgacgttcctgaaggcgcggctggtgtgctcggtgcccggcgtcgagggcgacacccacttcgatcagctccgtgagtgcgggagtgggtatggggttggggaggggggcagcggcgcagactccgggagcccccgccgcagcggggctgtgcgccctaccccagctaggccccttccccgcagaggatgtgtttctgttgtcctcgcgggaccaccggaccccgctgctctatgccgtcttctccacgtccagcagcatcttccagggctctgcggtgtgcgtgtacagcatgaacgacgtgcgccgggccttcttgggaccctttgcacacaaggaggggcccatgcaccagtgggtgtcataccagggtcgcgtcccctacccgcggccaggcatgtgccccagcaagacctttggcaccttcagttccaccaaggacttcccagacgatgtcatccagtttgcgcggaaccaccccctcatgtacaactctgtcctgcccactggggggcgccctcttttcctacaagttggagccaattacaccttcactcaaattgccgcggaccgggttgcagccgctgacggacactatgacgtcctcttcattggcacagacgttggcacggtgctgaaggtgatctcggtccccaagggcagtaggcccagcgcagaggggctgctcctggaggagctgcacgtgtttgaggactcggccgctgtcaccagcatgcaaatttcttccaagaggcaccagctgtacgtagcctcgcggagcgcggtggcccagatcgcgttgcaccgctgcgctgcccacggccgcgtctgcaccgaatgctgtctggcgcgtgacccctactgcgcctgggacggggtcgcgtgcacgcgcttccagcccagtgccaagaggcggttccggcggcaagacgtaaggaatggcgaccccagcacgttgtgctccggagactcgtctcgtcccgcgctgctggaacacaaggtgttcggcgtggagggcagcagcgcctttctggagtgtgagccccgctcgctgcaggcgcgcgtggagtggactttccagcgcgcaggggtgacagcccacacccaggtgctggcagaggagcgcaccgagcgcaccgcccggggactactgctgcgcaggctgcggcgccgggactcgggcgtgtacttgtgcgccgccgtcgagcagggctttacgcaaccgctgcgtcgcctgtcgctgcacgtgttgagtgctacgcaggccgaacgactggcgcgggccgaggaggctgcgcccgccgcgccgccgggccccaaactctggtaccgggactttctgcagctggtggagccgggcggaggtggcagcgcgaactccctgcgcatgtgccgcccgcagcctgcgctgcagtcactgcccctggagtcgcggagaaagggccgtaaccggaggacccacgcccctgagcctcgcgctgagcgggggccgcgcagcgcaacgcactggtgaccagactgtccccacgccgggaaccaagcaggagacgacaggcgagagaggagccagacagaccctgaaaagaaggacgggttggggccgggcacattgggggtcaccggccgatggagacaccaaccgacaggccctggctgagggcagctgcgcgggcttatttattaacaggataacccttgaatgtagcagccccgggagggcggcacaggtcgggcgcaggattcagccggagggaagggacggggaagccgagctccagagcaacgaccagggccgaggaggtgcctggagtgcccaccctgggagacagaccccacctccttgggtagtgagcagtgagcagaaagctgtgaacaggctgggctgctggaggtggggcgaggcaggccgactgtactaaagtaacgcaataaacgcattatcagcc

SEQ ID NO: 13928 - DNA, 3901 bp, Homo sapiens
aaactttacggcacggcgggcggtgcgtggggcggtggctggcctggtgggggcgggggctgcttcttaaaggagccgtcagagggtccccagcggccccagggtgggaaggggccagagtggagagatgctgctgcggaagtcctcggtggagtgtgagaaggcagccagtgttggcctggaagacctctagaacctgagaagaggcagcggcaagtgtcagcggagggaaggagggaggtgggggtcctggcctgggatggggccaggagctgggcaggagtgtgggtggaggggcctggaacctgcctcagcagctgctccacttgcttaatcccacctggaaccttgtcccactccctgggctcctgtgtccagcacctgcccagctgacccctgggaaggagggtgggcatagcagccaggtctttgccccagctgagggccagggggaggtgtctggctcctagagtgaaggggctcaaagatggggaagaactcaaggggtgagagaagtgaagggagaggctcagagaggctgtggaggcgttgagagggaaggccagctcagcgaggccaggaggctggggtgcaaatgaagggctgcctcaccttgcccctctttgattcctcaggggtgtggagagagagccctcaagctcaaatgcagaggctgcttcagctgggttgggagcagtccccaagtcagaggctgaggcttctgcccaggtcttgggtctcctgggtagcacttctccctctgaggaatggagtgattgatgctgcagttggatttgctcacttgcatgcccagagacatgtctattcttatgggtgcacacgtttgcacatgcacaaatgtgcaacacatctgtgtgcaaaatatgcacatatcacacatatgtactgcatggattgcacagtgccacatgtgtgtgcacaccaacccatatccacacatgtgcaatatgacacactatatatttgcacatagatgtgcacacacatgcacatacacactacacacatgcgcacatcacaaggggacactcggaaacacattcacaggcacccacacccttggctccagcctcaaaagtgtctctgtgtttttctgcgggactgtggggacactgccacctccagaggcctgaccccctcctgtcactctcactcttttgactggcttgttttgctcattgcacttggcaccctctgcatccatctgattccttgttggcactctgtcccctttcacatggggaccttgtctatgtctcccagtatccctcctcccaggtctaggctggcatgaagtgggtggcacattgtgaattaatgtctgtgagtgtgtatacaagagaggagattactgggaagggtgacgtggtgaggcgggcttgccagtgcagggtgaccctgagggtgtgcccagtggcgtgggtgtgtctgtgattgtggccaggcggggcaccctcggaggggagggttcggaagtggaatgcgaccccccagcctctttcccctaggggctgtaatctgatccctggggactccccccctagcctcccgccctcgccctcactgctgactcctcttccagatcctggggcagagtccagggcagctcaaggctcctccacacacacacccgctgaaccctgagcaccctgagctgctgagatggggcgggccggggctgccgccgtgatcccgggcctggccctgctctgggcagtggggctggggagtgccgcccccagccccccacgccttcggctctccttccaaggtaggtgcacctggcaggcgggagggcccagcttgaggtgggcaggaaagggtccccgtatggccagggggctctgtgttggctgttgccccatgtgcgtgcctgtcaccagactctggtaggattagtgggcactctcaggccacctccagttaaccctgtccgggcctcagcccccagcctctgcccacattctcttcgtgctttctcaggaagacccctcctgtccccacagcaacagaccttgtctctgttccgttcagtacccccaacaaggcgatactccttcagcagagcaacagggaagtcagagcccccttctcatgcctcctgtataggagggtggcccctgggcagtggcagtgaataggcagttctgctgagctcaggctggtggtggagtggcaggaaaggaactctcagcctgacttttgggagttggggttctggccatccctgcatgccagtctcccccaggactctggtgtccataagccttgcctcccagtgcgcccgcctggagacaccacctgtctgagcatgcccaagttcaacctgccttcctcttcctggggggatgtaccacctaccctggcagctccacacgtgcacctgggtgggcttgggtttgcgtgtgtaaactcacacacatgtaaactcacatgtgtacaggccaggtcctaatggcaaccttggccgatagagtcaccaccaggcaggacctgggggaggcttccagcatggctggcgagtcatcagcagtgtcctgccctgcagagctccaggcctggcatggtctccagactttcagcctggagcgaacctgctgctaccaggccttgctggtggatgaggagcgtggacgcctgtttgtgggtgccgagaaccatgtggcctccctcaacctggacaacatcagcaagcgggccaagaaggtgccagggactcccaaccccagcactccccagggaaggagccctgggaccccactccagcctggagagacccagaggaatggctccctgaggtagagaatatcccaagttcctgacctgtgtcccctctcccccaacctcccgatagctggcctggccggcccctgtggaatggcgagaggagtgcaactgggcagggaaggacattggtgtgagtgccagctgcccgggccgggagtggggagggtcagcccctcaccccagagacagggcagggctaaaacagaggcctgcctgttctggctgggatgagggcagggaggtcgaggtggctgaggtctgggggtggtgagtcagggtgggggctcgtgtaattcttctggggtgcctctgagtcatgggaggctttgcaggcctgtgcttccccagacacccaccctcgtgaggcctgggctggtcagcaagggcccccaggtccctgtagcccatgttagtacttgcctgggctgatgccgaagagagggaggggtgaggatgccactggtgagctgggacctcttaaggctacgtccctgggggaagcctcacacctccaaccctactagactgagtgcatgaacttcgtgaagttgctgcatgcctacaaccgcacccatttgctggcctgtggcacgggagccttccacccaacctgtgcctttgtggaagtgggccaccgggcagaggtaaggccggatctaggcagggagggaggtcaggagggtaagaagggcctggtagtcacaacttgccacacctcccaggagcccgtcctccggctggacccaggaaggatagaggatggcaaggggaagagtccttatgaccccaggcatcgggctgcctccgtgctggtgggtgagtccaagggctaaggccccaagagaaccccttagaaactctagaacctcacaaagtcccaagacccccaagagctccagggaatcccccataacctcactcactcccagagctccccaggccctcctgccccaagagccctccatttgcctgagtggcccttgctctgtctgcaggggaggagctatactcaggggtggcagcagacctcatgggacgagactttaccatctttcgcagcctagggcaacgtccaagtctccgaacagagcca

SEQ ID NO: 13929 - DNA, 934 bp, Homo sapiens
aaactttacggcacggcgggcggtgcgtggggcggtggctggcctggtgggggcgggggctgcttcttaaaggagccgtcagagggtccccagcggccccagggtgggaaggggccagagtggagagatgctgctgcggaagtcctcggtggagtgtgagaaggcagccagtgttggcctggaagacctctagaacctgagaagaggcagcgatcctggggcagagtccagggcagctcaaggctcctccacacacacacccgctgaaccctgagcaccctgagctgctgagatggggcgggccggggctgccgccgtgatcccgggcctggccctgctctgggcagtggggctggggagtgccgcccccagccccccacgccttcggctctccttccaagagctccaggcctggcatggtctccagactttcagcctggagcgaacctgctgctaccaggccttgctggtggatgaggagcgtggacgcctgtttgtgggtgccgagaaccatgtggcctccctcaacctggacaacatcagcaagcgggccaagaagctggcctggccggcccctgtggaatggcgagaggagtgcaactgggcagggaaggacattggtactgagtgcatgaacttcgtgaagttgctgcatgcctacaaccgcacccatttgctggcctgtggcacgggagccttccacccaacctgtgcctttgtggaagtgggccaccgggcagaggagcccgtcctccggctggacccaggaaggatagaggatggcaaggggaagagtccttatgaccccaggcatcgggctgcctccgtgctggtgggggaggagctatactcaggggtggcagcagacctcatgggacgagactttaccatctttcgcagcctagggcaacgtccaagtctccgaacagagcca

SEQ ID NO: 13930 - DNA, 3607 bp, Homo sapiens
gagcgcccctgagccttcccatggcccgggctggggcccgggccctcggctgctgacgcgcccgaagcccgcggaaccggttaagccgcggccgcggcgccgatcccggctgaggcgcagcggcgagaggtcgcgggcagggccatggccccggggggccgctagcgcggaccggcccaacgggagccgctccgtgccgccgccgccgcccgggcgcccaggccccgccgctgcggaagaggtttctagagagtggagcctgcttcctgggccctaggcccctcccacaatgcttgtcgccggtcttcttctctgggcttccctactgaccggggcctggccatccttccccacccaggaccacctcccggccacgccccgggtccggctctcattcaaagagctgaaggccacaggcaccgcccacttcttcaacttcctgctcaacacaaccgactaccgaatcttgctcaaggacgaggaccacgaccgcatgtacgtgggcagcaaggactacgtgctgtccctggacctgcacgacatcaaccgcgagcccctcattatacactgggcagcctccccacagcgcatcgaggaatgcgtgctctcaggcaaggatgtcaacggcgagtgtgggaacttcgtcaggctcatccagccctggaaccgaacacacctgtatgtgtgcgggacaggtgcctacaaccccatgtgcacctatgtgaaccgcggacgccgcgcccaggccacaccatggacccagactcaggcggtcagaggccgcggcagcagagccacggatggtgccctccgcccgatgcccacagccccacgccaggattacatcttctacctggagcctgagcgactcgagtcagggaagggcaagtgtccgtacgatcccaagctggacacagcatcggccctcatcaatgaggagctctatgctggtgtgtacatcgattttatgggcactgatgcagccatcttccgcacacttggaaagcagacagccatgcgcacggatcagtacaactcccggtggctgaacgacccgtcgttcatccatgctgagctcattcctgacagtgcggagcgcaatgatgataagctttacttcttcttccgtgagcggtcggcagaggcgccgcagagccccgcggtgtacgcccgcatcgggcgcatttgcctgaacgatgacggtggtcactgttgcctggtcaacaagtggagcacattcctgaaggcgcggctcgtctgctctgtcccgggcgaggatggcattgagactcactttgatgagctccaggacgtgtttgtccagcagacccaggacgtgaggaaccctgtcatttacgctgtctttacctcctctggctccgtgttccgaggctctgccgtgtgtgtctactccatggctgatattcgcatggtcttcaacgggccctttgcccacaaagaggggcccaactaccagtggatgcccttctcagggaagatgccctacccacggccgggcacgtgccctggtggaaccttcacgccatctatgaagtccaccaaggattatcctgatgaggtgatcaacttcatgcgcagccacccactcatgtaccaggccgtgtaccctctgcagcggcggcccctggtagtccgcacaggtgctccctaccgccttaccactattgccgtggaccaggtggatgcagccgacgggcgctatgaggtgcttttcctgggcacagaccgcgggacagtgcagaaggtcattgtgctgcccaaggatgaccaggagttggaggagctcatgctggaggaggtggaggtcttcaaggatccagcacccgtcaagaccatgaccatctcttctaagaggcaacaactctacgtggcgtcagccgtgggtgtcacacacctgagcctgcaccgctgccaggcgtatggggctgcctgtgctgactgctgccttgcccgggacccttactgtgcctgggatggccaggcctgctcccgctatacagcatcctccaagaggcggagccgccggcaggacgtccggcacggaaaccccatcaggcagtgccgtgggttcaactccaatgccaacaagaatgccgtggagtctgtgcagtatggcgtggccggcagcgcagccttccttgagtgccagccccgctcgccccaagccactgttaagtggctgttccagcgagatcctggtgaccggcgccgagagattcgtgcagaggaccgcttcctgcgcacagagcagggcttgttgctccgtgcactgcagctcagcgatcgtggcctctactcctgcacagccactgagaacaactttaagcacgtcgtcacacgagtgcagctgcatgtactgggccgggacgccgtccatgctgccctcttcccaccactgtccatgagcgccccgccacccccaggcgcaggccccccaacgcctccttaccaggagttagcccagctgctggcccagccagaagtgggcctcatccaccagtactgccagggttactggcgccatgtgccccccagccccagggaggctccaggggcaccccggtctcctgagccccaggaccagaaaaagccccggaaccgccggcaccaccctccggacacatgaggccagctgcctgtgcctgccatgggccagcctagcccttgtcccttttaatataaaagatatatatatatatatatatatataaaatatctatattctatacacaccctgcccctgcaaagacagtatttattggtgggttgaatatagcctgcctcagtggcagcatcctccaaaacttagacccatgctggtcagagacggcagaaaacagagcctgcctaaccaggcccagccagttggtggggccaggccaggaccacacagtccccagactcagctggaagtctacctgctggacagcctccgccaagatctacaggacaaagggagggagcaagccctactcggatggggcacggactgtccaccttttctgatgtgtgttgtcagcctgtgctgtggcatagacatggatgcgaggaccactttggagactggggtggcctcaagagcacacagagaagggaagaaggggccatcacaggatgccagcccctgcctgggttgggggcactcagccacgaccagccccttcctgggtatttattctctatttattggggataggagaagaggcatcctgcctgggtgggacagcctcttcagccccttctcccctccccgcctggccagggcagggccaccccactctacctccttagctttccctgtgccactttgactcagaggctgggagcatagcagaggggccaggcccaggcagagctgacgggaggccccagctctgaggggagggggtccgtggtagaggcctggggccggtagaggctccccagggctcccttatgtccaccacttcaggggatgggtgtggatgtaattagctctggggggcagttgggtagatgggtgggggctcctggtggccttctgctgcccaggccacagccgcctttgggttccatcttgctaataaacactggctctgggactaga

SEQ ID NO: 13931 - DNA, 3212 bp, Homo sapiens
gagcgagcgaacgaaccgcggcggtccggagagccccgagcgcagcgcaggacctgggaccacctcccggccacgccccgggtccggctctcattcaaagagctgaaggccacaggcaccgcccacttcttcaacttcctgctcaacacaaccgactaccgaatcttgctcaaggacgaggaccacgaccgcatgtacgtgggcagcaaggactacgtgctgtccctggacctgcacgacatcaaccgcgagcccctcattatacactgggcagcctccccacagcgcatcgaggaatgcgtgctctcaggcaaggatgtcaacggcgagtgtgggaacttcgtcaggctcatccagccctggaaccgaacacacctgtatgtgtgcgggacaggtgcctacaaccccatgtgcacctatgtgaaccgcggacgccgcgcccaggattacatcttctacctggagcctgagcgactcgagtcagggaagggcaagtgtccgtacgatcccaagctggacacagcatcggccctcatcaatgaggagctctatgctggtgtgtacatcgattttatgggcactgatgcagccatcttccgcacacttggaaagcagacagccatgcgcacggatcagtacaactcccggtggctgaacgacccgtcgttcatccatgctgagctcattcctgacagtgcggagcgcaatgatgataagctttacttcttcttccgtgagcggtcggcagaggcgccgcagagccccgcggtgtacgcccgcatcgggcgcatttgcctgaacgatgacggtggtcactgttgcctggtcaacaagtggagcacattcctgaaggcgcggctcgtctgctctgtcccgggcgaggatggcattgagactcactttgatgagctccaggacgtgtttgtccagcagacccaggacgtgaggaaccctgtcatttacgctgtctttacctcctctggctccgtgttccgaggctctgccgtgtgtgtctactccatggctgatattcgcatggtcttcaacgggccctttgcccacaaagaggggcccaactaccagtggatgcccttctcagggaagatgccctacccacggccgggcacgtgccctggtggaaccttcacgccatctatgaagtccaccaaggattatcctgatgaggtgatcaacttcatgcgcagccacccactcatgtaccaggccgtgtaccctctgcagcggcggcccctggtagtccgcacaggtgctccctaccgccttaccactattgccgtggaccaggtggatgcagccgacgggcgctatgaggtgcttttcctgggcacagaccgcgggacagtgcagaaggtcattgtgctgcccaaggatgaccaggagttggaggagctcatgctggaggaggtggaggtcttcaaggatccagcacccgtcaagaccatgaccatctcttctaagaggcaacaactctacgtggcgtcagccgtgggtgtcacacacctgagcctgcaccgctgccaggcgtatggggctgcctgtgctgactgctgccttgcccgggacccttactgtgcctgggatggccaggcctgctcccgctatacagcatcctccaagaggcggagccgccggcaggacgtccggcacggaaaccccatcaggcagtgccgtgggttcaactccaatgccaacaagaatgccgtggagtctgtgcagtatggcgtggccggcagcgcagccttccttgagtgccagccccgctcgccccaagccactgttaagtggctgttccagcgagatcctggtgaccggcgccgagagattcgtgcagaggaccgcttcctgcgcacagagcagggcttgttgctccgtgcactgcagctcagcgatcgtggcctctactcctgcacagccactgagaacaactttaagcacgtcgtcacacgagtgcagctgcatgtactgggccgggacgccgtccatgctgccctcttcccaccactgtccatgagcgccccgccacccccaggcgcaggccccccaacgcctccttaccaggagttagcccagctgctggcccagccagaagtgggcctcatccaccagtactgccagggttactggcgccatgtgccccccagccccagggaggctccaggggcaccccggtctcctgagccccaggaccagaaaaagccccggaaccgccggcaccaccctccggacacatgaggccagctgcctgtgcctgccatgggccagcctagcccttgtcccttttaatataaaagatatatatatatatatatatatataaaatatctatattctatacacaccctgcccctgcaaagacagtatttattggtgggttgaatatagcctgcctcagtggcagcatcctccaaaacttagacccatgctggtcagagacggcagaaaacagagcctgcctaaccaggcccagccagttggtggggccaggccaggaccacacagtccccagactcagctggaagtctacctgctggacagcctccgccaagatctacaggacaaagggagggagcaagccctactcggatggggcacggactgtccaccttttctgatgtgtgttgtcagcctgtgctgtggcatagacatggatgcgaggaccactttggagactggggtggcctcaagagcacacagagaagggaagaaggggccatcacaggatgccagcccctgcctgggttgggggcactcagccacgaccagccccttcctgggtatttattctctatttattggggataggagaagaggcatcctgcctgggtgggacagcctcttcagccccttctcccctccccgcctggccagggcagggccaccccactctacctccttagctttccctgtgccactttgactcagaggctgggagcatagcagaggggccaggcccaggcagagctgacgggaggccccagctctgaggggagggggtccgtggtagaggcctggggccggtagaggctccccagggctcccttatgtccaccacttcaggggatgggtgtggatgtaattagctctggggggcagttgggtagatgggtgggggctcctggtggccttctgctgcccaggccacagccgcctttgggttccatcttgctaataaacactggctctgggactag

SEQ ID NO: 13932 - DNA, 27722 bp, Homo sapiens
cccgcgcggctctgagcgccccgtcccgccggcggccgcgagaccagagcgagcgaacgaaccgcggcggtccggagagccccgagcgcagcgcaggacctgggtacgccgcgaggaaccgtgcagcccagcgcggccgcccggcccgggtccagcagccaggagagcgcagcgcttcgaagccgagtgcgcgccaccgcccgcgccccgcgctggggaatgcgccctcggcgcgccggccagggggcgcccgcagcccaccccaggggaggcggccccgagcgcccctgagccttcccatggcccgggctggggcccgggccctcggctgctgacgcgcccgaagcccgcggaaccggttaagccgcggccgcggcgccgatcccggctgaggcgcagcggcgagaggtcgcgggcagggccatggccccggggggccgctagcgcggaccggcccaacgggagccgctccgtgccgccgccgccgcccgggcgcccaggccccgccgctgcggaagaggtgagtgcagcgggaaccgggagggagcgggcaggcggccgggccaccccgcgacccctctgggacccgcggcactgcaactccgcagaagtgtccggggagcgggtctcgtcgagccggggggctgcccgcggacataggggcaacaaggctggggtgggattcttacctgtcctggaggcccggaccccttacctacggggcggcgtatggatgtgtggatgatgtggcctgcggggtcacccatgtgcaaagcaactttttcctgcaaggttctgggtgggtgctctcatacacccccaccttcacgcttctggagcgggagttccgatcccccttctgcctcagctctctctcccattaacgcccgaggcagcgctcttccccgtagatgcgcttgccctacctcagtgtctctacttgaggactggccagcccgaagggaagcggtatactggcagtccccacgtggggggtctcccacatcagcagagtgggaggacctccagtcctgaggcatttctcccagcattgtgccagccccttgacccccagctgccaccttgggtttgcttttacagcagagtcctgcctggattaggggcacggctgtatgtagtgtgtaggtgagcttggagagcctgcggtcaatccctagtttgaaccaggggtcccagtggtgaagtgggcaggggacagcgggggcttggcggggttgcccccagcagatgggacaggagggtatcaaagttggcctaggaatgaggcagtgctggcgggagttggctggagctggggctgggggccccactggataaataactcctaatttttgagatagctgtgttttgccaccagaacattactgcttgggagaggtaagggagacgccaaccaaagacaccagtatgtccaccctgaagctgggccaggttggggacctctgtcctcctgaattcacccagatagtctcccagtagttatcctagttgcagagaagggaaaactgcacccaggggttgggagccccatctcagcccagggagttggatggagctgaggcctcttcccaggctacccaaggggtgtgccaggaccccgtagggtatagtgtctaggcaggcggggggcacaggcatgcctactcctgctgctcccccttcagctccgaaggagccaggcccggaagtggggaggtgggggccggagagaaagcaggggccagagagaaggcggcagcccacccagcctcagcccctcgctgctcagcataccttggggggaggatggagccaggctcaggtgaccttgactgggaaaccctggccacaaaaggggggtttcagtcccagctatgctggggtggctctgcttcctggtccttgaggtgttgggggatggggaagctgaggagccaagaaggagacagagctcttgttgaagtgggggagggaatctgaggggctgggtagcgggtggggtgctgttgataatctccccatgttcccctacggcccctgttcctgcctcccttccatccaggcagtcctcagctcggaggagccaacctcccttcctggagacaggctgtccacccccacccccaactccaagcctgggcggtctggatccggctgtacagtttggccacctggccccctgtcccatcccaggtgcctccggactccttcctctggccgcctcttccctgcaccccttgccagccccggctcctcgtttctttgttcaagcgtctctcctccgtccctccctctctcctccctctctcctcctccctcccgcctgcctccctcccttgctccctcccaccagccttccttccctccttctctgctttcttcctggtgggctcccaggtggcggtggctgttcttcctctgtccactgacctgggcttggtgtgacttgggggcttttctggggctggggctgggtgacaggcatctcgggactggcagaggggaaggcactgtgggtttgccctttctttccctctctgtccttcttctccttttcttccttccctctccttctttcccccacctgccaggctgtccaagaggggacctggacttgagactgaggccccagcaaacttgagcccctccccattcacctctttaaaaggccaaagcatttggatgggaagtccctgtagggacccagtagaaagactccccacctctctggacacattgggtgactccaaccctgtccttggtgacactgactttgtcaccatgaacatggatgaaggaaaaaatgaggtcatggggaggggggaggcgggaggcaggttgacaggagcccccgttacatagtatcgaagctctctgagggactcagacggcatcttgcgccaggacagtatctcccagctcccctgagccccaccccactagcaggtcaagttcttgagcaaactcatgcttgtaaggacgtgtgtgggcctgcaagtgtgaacgtgtgcatatccacagctgttatcaggggcctcccaggtgcaccttgagggtgacggtggctgcacagccatttctcccacctgcccccacttctcagagcctgccattcagtcagcactagctttgtgcctcccagacctgaggaggggctggttctgattcccccatcccccagctagcctccccaggaggcagcatctatgacaggggatctggaaggaccatgagcggtgtgccaggccctcgggagagaacattcacacagagggtaccgcgtaaggagtgggccaagaggctgaagctgcacttcctgtctgaggagccatgagtggtttgccttggcaggagaggccagggctgggggaggtgggtctagggatgtcatcagggtctaatgagtggggcctaagagtcagactggagcctgggctttgcctcagcattgagcagctatggcaggggagtcccaggccatagtactgccaactcccatcccagcatcctagagatgggcctggggtcctgcctgccacggaagaagggagtacacagggcagatctgggggatggggctcacattttcagtctcgatgcccccacccgcagtgcatccggttgggggtggtggtaggagttggcgctggtttgtgccgggagggagcaatatgttctgacaactggtgctgggctgcgtttacccaacagccagcctgcctggggagacaatatttgaaaaacacagtattgaaacttggacctgctggggctatgggggattctgaaggtggcaatgccgctggcccagatccagccccaggcccactggccatcctagcttcccttctttgccctctagaggcggagctggaagttttccctggcaggaagtccttctgcctgtctgacctgggtctctcctgctttgattttagtacaagtggactctgccattctctgcctttccttttctgactggtgctccctctcttccatcttgggctgtctgcatgtgtctcattcccccactctctcctgtgcctcccctctaccgtaataatcaggtccaggtttctctgtactgggagaagacctgtggctggagcaggcagggatgcaccctatctgttccccattcctccaggtgggagggagaaggagtaacccactttattggccacagatgcaggggagaaaggagaaagcatgctgggagctggaaagagccctaagatcacctggttggtctgggccctgtgaatggaattcagcatgccatgaggggtagggtttgagtctccagcagcccccatcagttctggtgaccccaggctggggcctattggtactatctccccagacaaaggcaggccaaagaacgcacatgaggtgtgcacacaggggcattcatggccccaggctgggggtggaagcgtggaggtacccatcaacctctttgttcaccttgggtagaaattgaactcccccatctgcctcacacattccaatcttggttccccttcccaggtttctagagagtggagcctgcttcctgggccctaggcccctcccacaatgcttgtcgccggtcttcttctctgggcttccctactgaccggggcctggccatccttccccacccaggaccacctcccggccacgccccgggtccggctctcattcaaaggtaagaagctgttttgttcttccccagaaatcatcctctctttacaatagcgctcggctcctctgcacacgagagaaagggtgggtcaggacaaaaccaggacaaattgtacagccacataggttgtgggggagaagggagaccggggaggtggtggcttgctgggaaaggctggagaactgacccatttagacacttagcaaaagagtccagagtctgggcatcttccagagtcagactgtgggttcctgggctgggtggcctgaggtctgtagggcatgtctttctgtatgataattggagaggtggcaatgtcactccttccaaacttatgtctgctgcggcccctccttgccactgctatgcatctggtcctgccctgagcagcccctggggtggaaggtcaggcagttgggcagacactggaacctctggacactggaagagcaggacctgctctcttggggtgtgggtgctcgaggagccttcctatggtctccaagtgggaagggttcctagaatccaggaggggactgttggctgtgactggcagggaggccgccggtgggttcaggcagagcacgtgctgctgtgagggcctgagctcctgagctccagtgagcactttgatgagaagtcactgggaggtttcagtgatgggctggggtctgcagagtgagaggctggtcgcccgctccatcaccattgcacttaacccactggacaggtgcacgcacacggtacacacatgggtgtacaaatggctcactcgagagccacttcctcaagggtgtgtgtggtctgaagagtctcccctgggcccagggtgaggggcagtggccatgctggggcctgggggacctggggtcattgggagttctcagccttggccctcctctggccagaggtaacttcatccagccgcctgccctgggtggggtcgactcagccctggctggccagatttccgggcagccatactggggtgaaaggctggggtgacctttccttcctcgggcttggcggaggcccagccctcacctcaccatgtcccccagcagggcccctcccctggcctcgtcccaccctgccccttgatgggaggagtaggggagtaagctgcttatcatcactcttcccagtcacccggctcctggaatttctgaggctgtgcctggaaggagtcccctgcagggcctgagaaatgggctgagaagagttaatttgtttgggctggaaagcaccccccttccccgggccccaggaaggtgagatatttattctgctgatacctccacccttccctggtggaattcttcagagcagattaataaatcttgaaggggccagttcccccaaacccctccccagcccagggtctggcagcgagagtagagtgtctcctcccccgatagtggaagggaggggtggcttggtctccacacccctgggaccttgcgtccgctctgggtgttgtttttgtcatcatgcatgcaagtaagcaggaggggcaaaacagagaggggtcttccgtgtgctccttctaagcctccctggacctccaggggcaaagagttttgttcctgttttccagagagagaaactgaggctcaggcaagggcagggtcaaggtcaggcaagaggcagaggcaaagccagaaatagaaccctggtgtcctggccttgccggcgcccacatcgcgtcaggtcgattccctctcaattagctctgaagccgacacccgcagtgactaaaagctgagctcactggcagccagcctgggtgttgccggttgtggcggcctggggtggggctgcagcgcacctggggccacccatcccagggctcctgtgcctttgcacaggcaggttcccctgccctgaatgaccttccctgttccgacctggtctcgtgtcctaattttgtgcttagacttcacttactactgtatgacaggccccgtgctgagtgctggggactctgtggtgaacaagatagggtgctcacagtcaagctggtggaaaaagcaatggatatccagttggtcagggccatctgggagcccagcacctgctgtgtaccaggccctgtgtatccccctacactgggtggtctcagcctggttatgcacacatgaagtggccctcagtgaggagcaggcgcccaccaagtgtgtgtggagtgagaatggagaccaacacttcaagaaactgggctcccaccatcttcctcccagagtacacgtgggtggcacagagaaggttactctcagaagcactgctggtcactgtggctccatgtcatagttttttcatctgtgccttggatggacacagcagttgacaccccaggcctcaggggctcaggctgggcactccctgccctgccctgccctgggtcctgctgtagtggggaggtgccggttcctgcctgggtagggctggaccctccaagctagaggtgctggcataaggggccacactgcccagggtagataaaggaacaaaggcaggaactgggccaggcttgggtttgctgcccgcccatccgcctgggcaccccagccaggtctagagccagaagggtgtgagggtcaagcagcccagggttccctcagattaggggggctcctatggcccagcttctgggcttcagcagcacagccaaaatcaggcagaagtgagggtcaaatggagatttccaggagcaggtgaggtgtttgttcattccttgctcttgagagagtggagcctgggctggaagcctggacagaccctccttccttcacccatccatgcctgggcctggagtcccctacactgcagaatcactgccaaatctcagagaaaaagctcttccttcccccaccttgagatgacccaggctctggggcaccacctccctccgtggcagcagcagggaggtgtgagggccctgccaggccctttgttcagcctggggagtgtttactttttcccaggaagctaccccacgacacactgctgctgcctgggctgggtttggccagggattggggccaagagatgtttggtggggtagaaggaccctgtgatgacatgagacagttgtgctgctagggaagctgaggcagaagtagggagagggagcagaaggtcaccctgccaggggaggtcaggaaagatgaacataatcgaaatagtagtaggagcccatgaggataaccaagcaatggtccctccaagacctaaagagggtctgcctaggtttcctgtgaggaaggaggcttacgggggctgagcggcttcccaggtcactcaggagcaggactgagatggagcctgcatccgcctgatgcctgaggctgtcccaggactgagagtggagggcagggatggtggtggtgctggaggcacagacccttcacatgagctaggaacaaggaagattccagcattctgcagtgctggtttaggcttcctagcctcgtttcccaaagaaagggctggggtcgcactgggcaggctccccatgccctctgtctgccgaagcaacggaattggggtttgcttatttccaggctataaatccggccctccatcactctggcccttccactgagcagggtccctaggaaggcctctcatgtcagagatgggaacatcagggcctaagagaggaaagggctcctgttccagagcagcctggagtttgagccctccaggccaatagcccagaacagtgccaccgctcacatcatttgcatgtggcatcagaggaccaaggttgccaggtttggagatgatgaggttagaggttaggaagggtcacagcccgttgacttcccctcaggagttgatgtgagttgaggtgcctctagcaagccttgatggggccttagccctcaggcctggtgcaggagtaggggtggggctggagagctagaggacatgctcttgccccccaggggctccttggccagccagagcaaggcatggggctttggtgggggaggagggggaggaggcccaggagctttgaggccagtgtggcaccagggagctgggcaagggtcaggtggctctggcagctacagtgggggttggagctcacaagccagggagggtaggtgttccaggatacgccaggatgagggaggaaggaagacccaaagcatgaacttgagcccagatcccttgaggccagatctggagtttcagttttctggaaatgggagctgccttactcctgagagacttggaagtggccgctttggagttgggaggtcctggaagctgcacatcccccaactggctaggaattggtctttggagagaatggagacagggtccttgtgcttgctggagaacctgcctgacgcccagcctgggtcagccaggccaggggctggggctttcagctgtggccttccaggtcaagtggagcttcagatgggacctccactgtctgggcctccgcagcacaggccttgtctctggttccctggcatgatgcccgcccctccttccctggctccagcttcccttggcactaagtgaggagctggtgcatgctcaaggagtaaatcatgttccttggcagcccccactgcttcgtaatcgtaaagaatttaaagagaaaccgccaagataaaaatctcaccagcccataaaggcatctttcaccctgcagcttgggagacagtgagcctcagagtgggctcttggctgtctgcacctgtgtgtatgcacctccggccccttgactcctccagaggtggtaatagctcagaaggtggctttagggccatgggtacctggtccttgactcctgggagacctccatctcctcactcaggagagtggggtgcttaaatttggtgtaatgcagaagtggtgatggtggtggctgagctagctggtcccaaaggcaaaacccagttctaccagtgttagctgtgtgagttcagccaagtggcttagcctctctgagccctggtttctcctgtgtaaggtgggaatggcagtggccctgtggaagcagcatcatgagggctcagactgtcttgcttgcatcctggccatgggtggatcttgcttggtgaacatcattctgtgttcccactgccttttctggaaaatgggagtaagaacaatactggcctcgttgtgttgtcaggaggattaactgtgtgagtatggtcactgtggaagaaatctcagtcaccaggagcgatcctgaggctggtgtgcaggtgagggcaggtccaggggcatgccccaaggagtcccagactgcctcaccccttcctccagaattctaacttttggtaagggagatggtatttggaaaggactccaggaaggaccctgagtcctgtggggtgggtggagtagggtcaggaggaggaaaattcctaccatgggtatctgggcaggcttcatggaggaggctgcatcttgagcaggggaggggaggttgtaggggagggaagagctggagcacagggagggtgcatgtggtgcagcacctggggaagaggacagatgctagatgcagtcttgcttttgggacaaggatgtagagttctactttctgtttctggtttttaagctctttttcctcatggcagaggtactaaatatgtattatggaaaaattccagtgatacggatgcatttggcgggagtgatgccttggaagtagctccctagagactggctccaaggcctggttgggacgcacagttggctgcaataactccttctgtgaatgctgctccagctcctgccgtgtgtcctaggggtgaccagacctgggctgctcactcaggcatctgcagggctgggcagaaagcatgtttgcctggcttggcctggtgctatcctgggaatctgagccccgcctcaagaagccctgggagctttggagaagcagagaggattcctgctgcatttttcttagaaatagcaagagggcctttgccagaggcctggatgccagaaggctatggtctgaatccaaagcctagctcacgtgggtgccagagcttggcaggcctacagccccccacccagcctgctgggcagccccagggagagggtggaggcctcctgggctccagtccctgaccactggtcctgacccagcaacgaatggggtctgggcagtggctgctggcctaggattggggggctagcctgttggggagggagtggggctcatcgggctgacgggctgggctgacttctggcactctcactgggccgaggggagcactggctatctggtgcatctctgcagggcaaagacagacccaaagcaaccggcccctccagggatcaggaagcctcagctccggatcccccttcccccactcttcttccttccttcctccccctactcccccttgcctccacccctccctttgccacccctcttggcttcctacccggacatgctctttcctcggacgtctctgtacccagccaagagccttgttccttcccacttggggctcggtgctgatgccctcatttcccccggccagagtccactgcctcgtgtgtctgctgttcagccagcacggttgccttctaagggtcatacactacaattggcagagcggctagaatttgggagccctttgggctcctacagctccaaggctgagtggctagcactccagggggcctctcccagggctgcctgtattgccatttttatcagcgccttcctggctgggcctggggcctgtgcggagtgctcactgcctgcccttgactggctacctgctgagtcctgctgaggtcctaacccagcctcactgcatcctccaaggctgaccccaagcatgcacctgtctgccctgtgcctcggtttctccatcagaatgttggggaggggctaagactgtctggaacatcccgggaatctctgggtgggtgttgtgaaggggctgcagggaccgcaggaatccgaggaaggccgcagagatgggggctgggcccaggggagggggagggttttgacacccaccagcctgttggtcccatcttggcctgtctgtctgggtgatttatcagagtaaatgagccatggagagtttgttgtcttttgcagtcatggggaggaggaggtggtggaggaaggagtgaggggtttccgggccaggtctggaatgtgggaggaggaggtgggtcccccgggggcctctgaaactggaggcactcactgaatggccttttcactctccccacctgagaaatgaatcagtgcagccctccccttcagaacaatcccctctttccatccccttcatacttcttggggcacattcctgtgtgatctgcttgtctggtcatcttctcccaccccctgctcaggaccaggtctcttgaccacagtgtccttccaaagctgagccggagccctgacttgcccagctggtgaatgcccaaatgtgttctcacaggcaaccatgcacactgttaagttccaagtgggacgtctaggcctctggaactaccagcccaggcctaggatggtcaggtgcatggaccatggggaaggcaggggtcagtggaggtgccgaggccggagagaccccatctgctgggacagaaggtccgaagtcattgggtgtccttcggggatgaggcatggatcccctggttcccggctggcgagtcagggagtgatcctgctgctccgtcacttctggcttttcctggtttgaggctgagctgtgccctcagcctatcctgtcctgggcggagtaggtgagcactggggcggaacgggcgtgggaacagcatgcctggacctgctggccccagccccctgccccctgcccccagcctttagtcactgaaatgggagggaagtgtacagtggcgttttggcccagctgggctctttacccctgtacggtgtttactgaacagctgggatgtttacagtagcccttgcaaaggggcccctcgttgcaggggatttcccatcttgagggtcccactggggctcttctgacctcaccaattccctgcacccctgggatagatgtgtcagggatacagagaccataaccatctccaccttaccagagccagtggtgcctgtccccttggcctctggccttcggttcctctgctctggaggagccaacatttcccaccacatttcctagagtggcagctctaggtggtgaaatacggtaactgggtccccagttcagacatttaaattaaattcaatcagagcggttattgaataaaaacacgcggagtcatttacatgttaattatgttgaatggactactagaccataattagttgctaattgggtgagagtggctgtaattggttttgttggcaccaacctggctcacctacctggggggaagcgggggttggtgtggatggctcctagggaggccctctgggtctccaatctggaaggcctggctagagatgctatgcgggggcagatctccaggggcttagggtcagaggaacctggaacctctccccagggagggtgcagctggggtctggcttctagggttcccatccagagcatagggggaaaagggggaactggaggagctaccccagatcagcagtgatagtctcccctgcccagccccatgtgggacctgggcttgaacaaatggtaagtgcccaagagtgggtctgtgggagcccaaggcaggcgtcactcaggtgtgtctctgcacatactgggccctgggttggcctgatcagggtggcgttggggtgtaagtgggtgtgccaagcaggaggaaggtacgtacaaaggcatctgggcctccctgcccccccgcttagcttggctggggttcccggggttgtaggtctgtggccatgggctgaggccttccggctggccgctcattaaaagaggattaggctgagagccagggggccagcccagtccccaggccttcctctggggctcctcacagctttgggggagtgataaaagggccggggccaccccttcctggatcctgtgggggtatccggtagggaccacctgggccctgccatgcctcttgccgccactgctactatagccttggctacctcagtttccctcctcagaaggtcaggaggtctgtctttccggtgggtgaaacactgacaaagacccaggctggtgcctccccttgtcccccagtcccatctctcttcagctcagggattagggctgcactggctcactagaggtcagaggtctgagctaggctgcagggatctgtctatcatccccagtccccatcactgctgggggaggtgacgctgtcagtcagggcctgctgctttgtggggctataaccaagggggcgggctgcccacctctgctccaagactcctctttttgcggcagcccacacctcactgcacgcagacctgatgtcctggagaccagcagcaaggggtaggggctgcccacttggggtcttcgggtgagggctgtggacacgcctcctcagtgcctgtcctcacctgcccgcacctttaaagtaaggtatcaccagctgcttcccagatatgagggaccgggggcccccaggacccagccccgtgtgccttgagaaggtcctgcctctggacctgtgccaggccgctttgggctgggaccccaagtgcttgatggccatgagagagtcctggaggccaggaatggctgcggaaatgaggtgtctgatgccagaaaaggctcttccttcccgatgatgggaaaatccttcccggatgtcacccctcccaacctgtgcccagcctgggtgagagtatgggggtggggagcccttcccaggagacagcacccaggcacaccacccttcctccccctaaggtcaaagcttatctgggctggagtcctgatccccacagaacccttgattgtgcccagcccctccctcaacattgccatggcattcgaggaggcatggcgctcctgctgccagagccgggcgtgggacaagtggagcagatgtggggattggccttaggacatgaccaggctgggtctgcatcagccctggcccccactgatgccacctcaggtcccaggttcctttgttccttctgtcccaagtccctgtcccttaagggagctggggcctggtaggatctggcacctgctgatggcaggttttggaggaggatacccagggctacttgcccaccccctgctctgactcaggctgcttggaggagtgaaggctcccagttcctttgcctcatggtggagtggggagcaggggacaggacaccctgtgacctgggttgagtaccactctcctttgggcctcagtcttcctgtctgcagctgggggtgcagggctgtcacagggctccttgtttcccttttcacctacagtctggcatgagtggggtcagaagtccagctgtgggttgagaaggctggaaccttacaccttctttgctctgggacccggggaagttcccacccctctccaccttggttcccctctggtaggctgggtttggatgaatggtttgggatttagctctattcctgtgggttggggatggggtaaggacacactggagttgggaaggctggagctgagtccacaggttgcctcttcctgccttatagccctctctgctccccaatctagcactaggaaatggagtagctggggtgggaatggggatggatgccctacaagagatagcgacacgtggaagcctgcttccttggggaaggacttgggacctcattccactctcctttccctgaaaggcagagacacccatgaaggatgggttgggggaagacctgaggaatgccaggccgtgagcctctctctgagatcagaacggggtcactgatcctcagggtcactttgaatatcagtaccaggagggcctgagagatggtctagactagagaatgaggctcagagagcgagagtgcccccaactcaggtcatgaagctcacccagaaactcaagccatagccaaggatccctgatcctgggtcccaccccttccccaccatgcgcgacctcctggggctccccctccccccacactgtttccacagtgaccaaagcgtcacgtcctgtgacaccagagccattgacgccatatcccgtggccactgggaggggtcccgcaggtcctgagtcatgtgccctgtccacggggagcgagtcaccttccggccctggccctcctggcaggcagtctctaccaccaggactggcttcccctgggcctccccctccttcagccatggacctaggtgggaatcccacccccatgcactctggcatgtcacatcccttccctgtgccctgtgcccttggtattgtgagcacagggctttgtgcacagcgggtgttcgataactgagcaaggggctccctccacccccacctccacccaggggcagactgggggcagcaggcagagagggtcgaggccaatcctctgcccctaagctgggactcagtttcctcatcctctgagtgttctctacggcctttctcacagagggagctggagtttgggagtgctggggctttgcaagagggtaggggactcggacttgggcctcgggctctgggagtcttggtgcagggttgatattatagaggcccaaggctgcgcagggttggagcttggggattatggctgattgggttcctgggggcttaatggctgaagcttccccttacccggagtgcccgtgtctgaaggcgcccacttaagcctctagcccctccccctgccattgcccccaaagtgccccctagcccaggggatgggtaagggcatgaccgagccatgcccccagccagggtataaataacccctggcgggctgtcccagcctgggggggctccactggcagccccacttcctctctggccacttcccagccctgggggtgggggaatgtttactttcctgttgtcactgtgggtgagcagccaggcgggtgagcggccaggcgggggactccgagtggcccaacaacaggtgcgggacaggtgcctgggccgccctgcccaggacttcagaggcgccgctggacaggcgggtgaggccatcgccaggcaggatcggccctttgatccctcggcgtccctgcgtcccagcggttggccaaggtcatcacctgcattcccttgtcaccgcatagtcagggccaggcagggcaagacctttccttacccactagtttctcagagtgaggtcctgggaccagacatgggctctgggtcagctggtggaaccccctgaccccagcccacctctgccccaccttcaggctgtgtctagggcctcggatcccagctgttctccccctccaggtgccttggggcctggcccaggcctctcccttgactgccccacctgtgaaatgggttaccagctggggaggggagatgagacatgtgtgacccccttggtgagtgcctcatgtgtggtaggacatgtgtgcgccatgtgcatgcctgtgccacgtgtatacatgcatgcactcttctgtgtgctgctatcttaagccccctgtgtgtgtgaatattcatcatcctcattacagtgttccctcttttgctgagctaaagatagctgggggtgggtggagagggggcttgccaaggggacccctcggctctccctccccttggaggcaggttcccaagcttctaggagtcctttgtctgtcattgtctgagccccctcctgtccttcatccttaggaaggacttttccccagcatcctggagttggaggggccaaggctgctggactcatgcaaaagggaaactagaggacccagttgaaccctgcctttagccccagggttgtagctccagggagagagcctctttcccagaaatgactgtcctggctcattcaaggtggcctgagagttccaccattagcagccttatagggtctgggggaagctggggtccgtagggcagtgtgtccagcagggctttctggtctcctggctaacctgcttcagaccaagtgaggaccttgctgtgcaccagctgtgccctctgcctggtgggcagccagggtaagaacagggcatccaggctccatgccagagtctgccggctgtcccagatatacccggtcacacccctatctgctcattaacccttttaagcccctgtgtgaagctggccccaccctgagcgtgggagcattaacccccacctgagcaaaaactctttgatgctgttgcgtaccctggcccgcacctaccgccctttcattgggacccagagactagctagggctgtctatgaatcaggggtttagctttgggtgtggcgccttccctggcctgcctacctgtgccactttgtcctctcagtctgtcagggactggagagggagctgagaaggatccaggaaggggagctggaggtttaagaccactgtgtgggctgggcacagtggctcatgcctgtaatcccagcactttgggaggctgagacaggtggatcacgaggtcaggagttcgagaccagcctgaccaacatggagaaaccccatctctactaaaaatacaaaaattagctaggcgtggtggcgggcgcctgtgatcccaactactcaggaggctggggcagcagaatcgcttgaacccgggaggcgaaggttgcagtgagccaagatcgcgccattgcactccagcctgggtgacagagtgagactccatctcaaaaaacaaacaaacaaaaaataagctgggtgtggtggctgacgcctgtaatcccagctagtcaggaggctgagacaggagaatcgcttgaacccagcagatggaggttgcagtgagccgcaatctcgctactgtactgcagcctgggcaacagagtgagacttgatctcgtaaaaagaaaaaaagaaagaaagaaaaaagaccactctgtggtgggggtcctgaggggaacctcagggcctcagtctcccctttatcagagggggtatggctggatggtttcctgaaggtcctaattggtgccctgccctccacccacagagctgaaggccacaggcaccgcccacttcttcaacttcctgctcaacacaaccgactaccgaatcttgctcaaggacgaggaccacgaccgcatgtacgtgggcagcaaggactacgtgctgtccctggacctgcacgacatcaaccgcgagcccctcattgtaagggctggccctgatgtgggacgtggggtgggcacggagccccagggctcagggcatgtccagaaggctgcaccttctgacccccctctctgcagatacactgggcagcctccccacagcgcatcgaggaatgcgtgctctcaggcaaggatgtcaacgtgagtttggtgggatccacaggtgggaagggggaatccacaggtgggaaggtactgcccccagtgagggggcaggcctggccagggcacctatgcagccttccctgtggccccagggcgagtgtgggaacttcgtcaggctcatccagccctggaaccgaacacacctgtatgtgtgcgggacaggtgcctacaaccccatgtgcacctatgtgaaccgcggacgccgcgcccaggtaagccccagccaccctggccctgtgctgcccccgctggtggctgcatcccagggtcctgatgggaggaggggcttcagccccagccctgccacttccgagccttttgaccttgggtgagtgacttctttcacctcgctgagcctcagtttcttcacttgaaaatggggctaaccgctgcctttctcacaggtcggtgtgaggaggaggcagtgagctaaagctcccaaagctcctagcactgtgcctggcacatagtaagcacttgctccatatgtggcaacagctctcttggctatgcctgtggaccgtgccccgacggccgagccagagggcctggtgggggccttgcaataggaggctggacccctgggtcagcttctaccatgtggcctgggggagagctgccttccacccccagggccagggttgtggggagctgccccttccccagctctgccccttcctgcctgcttccacccttttccatttccatgtgggcatgtgtgtgagctggcgtgaacttgtagggcatgtgtgagaatgactggatctgaggggcacctgtgtgtgcaggtgtgtgccaagcctgtgtgtatgtatgtacacacgcatagacgtgctctggggggcccacgtgttcacgtgtgttcctggcctgtgtggtgttagaggctggcagcccgagcccgctcccccagcccctgccacccccagctctaacccctgttcctcgtcttctcaggccacaccatggacccagactcaggcggtcagaggccgcggcagcagagccacggatggtgccctccgcccgatgcccacagccccacgccaggtgggcctcatccctccaggcctttgccaggcagcactgcctctgagcggaactcaccctgggcctgcacctgaggccagcctccccagggcctcccctctacctctgtgcccacaccctgtccccaccccttcccctgaagagccctcaggctcagaaggcatgcccagctggactcatgtcagcctcagtgtgacccctgcaggcaagaaataatgaagccgccaggtggggaagacaggagccctggggacagccatgccttagccctcagaaagcatgtgtgtagacacacaagagcacacaccggtgtggatgtgggccttcctcactcagcacccagagtggaaagtggcacatgagtgcagtctgacaccttactcccaggtgttcgtgccccatgcctcccatgagtcatctgtggacacaggtgtcctgcacactcatgtgcttggggcgctcttctcccgtgtggtatctgtccactagtgatgacctgggtctgggctgggagagctggggctgggcaggggcgggcaggggggcaggggctgccggtgaatgacagagcatgtttgtggtggggagtgcagaaatgcaggatcgtgtggattctgtgtgtgtgtgtccatggtgtgagcaggcggttccgtgtgctggcggtgatatgttcagagctgtgtgtgcacccttgtgtgtgcaggaagtcacgtgtgcagtgtgtagctggaagtaggcctgtgtgcaccttcccatcgccatcctgccacctgctgccacctcctcctgcctctgttcctctctccttgcccctttccttccctctgcctggctttctcttgtggcctctgtgctcacccctgtcccagtgccttttccagccttcctagcatcttgcaggctgggctgggaggcacagggggctttgtgaattccatgtggtctgggctggactccttgactcctggctccctggggagatgtggagcctgggggctgtgctgagggacaggagaaaggtcatggcccattggtccatcctgaggaccacaggtaggacacaaagcctgaggatacagtaaccttagagctctctggcctggctagacctgatggcaaaggacaggaccccaggcccttaaccagtcactcctgccctggccaggtctgcagcgctttcttgacccaagacaggcagccacagcaaagagctgtgcctctgtagcccagggggccttggccagtgtctttatgagccagttggcatggaggggcttcagcccctacaagcccactccatgtccatctcatagcccacaaggcagggccccttgagacttggtccccaggtcttccctaagacctgggactaggaagcaccccccttggagcccacagcatggccctgccctgggagacctggctggatggagtttaaggccaaggaatgctggggagtgtagggggtgggctcggggtatgcctgggggctcattctcaccctgggagcctggtgacccttacacttcctggctgggggactggcctggacgatgctgagccccgctctgccttacaggattacatcttctacctggagcctgagcgactcgagtcagggaagggcaagtgtccgtacgatcccaagctggacacagcatcggccctcatcagtgagtgccccccaaccccgctctacagtctcaatgtgtggcctctgcccctggagatggggcatggcaccaacacttacccaagggcagagaccatgactaggctgtccctgaactccccaaaaggccccacctggcaagggggagagggtgcaggccagaccccactgtgagctgaggtcagagactgggtggtagaagcctccgcctggcccctttggatgggggaccaaggaagccaggtcctaccctgaaacacacaatgtggtccatgcaaagtccagaaccctcctgaccataggcttcctagaagagaagataagccgagtgcgtatcggggctggtctgaggggcagtcccatagcatgttcttggtgtgtctgagaggctgggagagccctgtagcgaaggaccaatggagagttccggccctgtgaccagacggggagagcatgttcctggtctgggtaggtgtctgggagggttgggggctgttctctgagtaggggtcctgccggggtctcaggagcagctgctgcccctaactgcaggttgggtgaacccatcactgaccctggctcatgcacgctgcctgttttctgattgttcaacacagtctgcctctcagagcagctgttgggcactgtgccacctccaagcctgggaaaggccctggggtcaaggggcagacattatcctccccctcttggcaagtgagaaggtcccagcctgatggcacagcccaaatcactctgatgaggaaagacagggcctgccctgggggagcctcagatgtggtatgttagaggcaagtacattattaaattttcaggaattttttgagccagttgttaaagacaactattattaaaagttaaggccaggctcagtggctcacacctataatcccagcactttgggaggctgaggggagtgtatcatttgaggtcaggagtttgagaccagcctggacaacatggtgaaaccctgtctctactaaaaaataaaaaataaaaaacattttttaaattatataagtttacgattaaacattaaaacaaaggtaacaacaataaaaagtaacaaacactcaaaactagccgggtgcggtggctcacacctataattccagcactttgggagacggaggcgggcggatcacctgagatcaggagctcgagaccaccctggccaacatggtgaaaccttgtctctactaaaaatacaaaaattagccaggcgtggtggcaggtgcctgtaatcccagctactagggaggctgaggcaggagaatcacttgaacctgggaggtggaggttgcagtgagctgagatcgtgccactgcactccagcctgggcaacagagtgagactccatttcaaaaaaaaagaaaagacttgaaaattgaaattgatctatgggctgcagaatggatgttgtgttagcaggcatgaaaacaacatttgtctccttgcacacctccatcagagctctgatggagaccaagaccaataagcagtaatattttgaaaggaatctttttttctgagcagtgggtttaaaatattcagaaaaccggccaggcacagtggctcatgcctgtaatcctaggactttgggaggctgaggcgggtggatcacttgaggtcaggagttcgagaccaggctggccaacatgggtgaaactctgtctctactaaaaatacaaaaattagccaggtgtggtggtgtgcacctgtaatcccagctacttgggaggctaaggcagaagaatagcttgaacctgggaggtggaagttgcagtgagctgagatcgcaccactgcactccagcctgggcaactgagcgagactctggctcaaaaaaaaaaaaaatcggtaaaccatgctgtaagcagatgtgctgtcattcaggctttgttgttatttatagagctcaggcagagtagattttgcaaaattctttttcttttttttttttttttttttgagatggagtctcgctctgtcgcccaggctggagtgcagtggtgtgatttcagctcactgcaagttccgcctcccgggttcacgccactctcctgcctcagcctcctgagtagctgggactacaggcacccgccaccatacccagctaatttttagtagagaccggggtttcaccgtgttagccaggatggtctcgatctcctgacctcgtgatccacctgtcttggcctcccaaagtgctgggattacaggcgtgagccaccacgcccacccctatttcacataattcttaagggccctagggttcttggaatggtaaatgagcactggcttcaacttaaagtaaccagctgcattagcccctaataagagagtctgactgtcgttcgaagctttgaagccaggaattgatttctccttgatagccgtgaaaatcctagatggcatgttcttccacgagaaggctgtttctttctttctttttttttttttttgagatggagtcttgccgtatttcccaggctggagtgcagtggcaccatcttggcttaccacaacccctgcctcctgggttcaagcgattctcctgcctcagcctcccaagtagctgggattacaggcgcatgccaccatgcccggctaatttttgtattattagtagagaaagcgtctcgccatgttgaccaggctggtcttgaactcctgacctaaagtgttcctcccacctccgcctcccaaaatgctgggataagaggtgtaagccactggccctggccagaaggctgttttatctgcattgaaaatcgtgtttagtgtagctcccttcatccatgatcttatctaaatcttctggaaaacttgctgcagcttctccatcagcacttgctacttcaccttgcatgtttatgttttggagatggctgctttccttaaacctcatgaaccagcctccgctggtttcaaacctttcttctccagcttcctctcttctctcagccttcatagaattgaagacagttagggctttgctctggattagactttggcttaaaggaatgttgtggctggtttgatcttccacgtaaaccagtaaaactttcaccatatcagtgataaggctgtttcactttcttatcatttgtgtgtttactggaatagcccttctaatttccttcaagaacttttcctttgcattcacaacttggctaactagtgctagcagcctagtttgggacctatctcagctttcaacatgctttccgtactaagcttaatcatttctagcttttttgtttttttttatttgtttgtttattttttgacagagttacactctgtcccccaggctagagtgaagtggcatgatcttggctcactgcaacctccaccccccgactccctgctccccggttcaagtgattttcctgccgcagcctcccaagtagctgggatcataggcgcccaccaccacctctggctaatttttatatttttagtagaagtgggttatgccatgttggccaggctggtctcctgacctcaagtgatcccctgcctcagcctcccaaagtgctaggattacaggcatgagccactgcacctggcccatttctagcttttgacttaaagtgagagataatatgactcttcctttcacttgaacacttagaggccattgtgggattattaattgatctaattttaatattgctgtgtcccagagaatggagaggcccaagaagagggagagagatgggagaatggccagtaagtggagcagtcagaacacacacagcatttatcgattaagttcactgttttatatgggtgaggttcacggtgccccgaaataattgcaatagtaacatcaaagatcactgatcacagatcaccataacagacagtttgaaatattgcaagaatcaccaaaatgtaggcaaggcgcggtggctcatgcctgtaatcccagccctttgggaggccgaggcaggtggatcacctgaggtcaggagttcgagaccagcctggccaacatggtgaaaccccgtctctactaaaaatacaaaaattagccagatgtagtggtgggcacctgtagtcccagctacttgggaggctgaggcaagagagttgcttgagcctgggaggtggaggttgtagtgagctgagatggtgccactgcactctagcctgggtgacagagcaagactccatctcaaaaaaaaaaaaaaagaagaattaccaaactgtgacacagacacagagacacaaagtaagcatatgctgttgaaaaaatggtgctaacagacttgcttgacacagggttgccacaaaccttccttctgtaaaaaatgcagtatttgcagtgcacaaagcccagtaaactgaggtgtgcatatgcttcctaattctttcactacactttattgttagctatgctctttttttgtttttttgtgttttttttttttatttttgttcctgctttttgagacggttgtctcactgtgtcaccaggctggagtgcagtggtgcgatctcggctcactacaacttccgcctcccaggtttaagggatcttcctgcctcagcctcctgagtagctgggactacatgcgtgcaccaccacgctcagctaatttttttgtatttttagtagaaacagggtttcaccacattggccaggatggtctcgatctcttgacctcatgatctgccagccttggcctcccaaagtgctgggattacaggaggcataagccaccatgcccggcctctttttttttttttaagatggagccttgctctgttgcccaggctggagtgcagtggcatgatctcgctcactgcaacctccgcctccctggttcaagcaattctcctgcctcagcctcccgtgtagctgggattacaggcacctgccaccatgcccagaaaatttctgtattttagtataggtagggtttcaccatcttggccaggctggcttccagctcctgccctcaaatgatccacccacctgggcctcccaaagtgctgggattataggcatgagccactgcagctggtctattagctatgctcttgaggtgatttacatttgttgtgtctgtggggtagaaatactgtacagtggtgttggcagctcttcctgattttgctttcagtgacctcaggttggtagcttgaaattagttgtggcaggagtattcacaccacagaaatgggctattgctactaatcagagctgatagttactaatcccaaccctcccagagccagtggtgaaacactgaccagcactccactggagataggatcatgccccagggagcctgagcggggagataaggccctgccctggaagtcatctgagctgtgccctggccctagcaaacagcagccccccaactgacccactggcctacccacagatgaggagctctatgctggtgtgtacatcgattttatgggcactgatgcagccatcttccgcacacttggaaagcagacagccatgcgcacggatcagtacaactcccggtggctgaacggtaagcgcagccccaggagcccttccgtggccatgtgtctgggatgcggcaaggaggtcgtaaagaagcacatgtgggggaagtggggacatgtttagcctatgactacctggggcaggggtagtttcttatctggagaggagttgggggtgttcttgcacctggctggggattctgttggagaacatcaggggcaccatcagagtaggggctcacccagctgacccctgccacctgcagacccgtcgttcatccatgctgagctcattcctgacagtgcggagcgcaatgatgataagctttacttcttcttccgtgagcggtcggcagaggcgccgcagagccccgcggtgtacgcccgca

SEQ ID NO: 13933 - DNA, 936 bp, Homo sapiens
cccgcgcggctctgagcgccccgtcccgccggcggccgcgagaccagagcgagcgaacgaaccgcggcggtccggagagccccgagcgcagcgcaggacctggagagtggagcctgcttcctgggccctaggcccctcccacaatgcttgtcgccggtcttcttctctgggcttccctactgaccggggcctggccatccttccccacccaggaccacctcccggccacgccccgggtccggctctcattcaaagagctgaaggccacaggcaccgcccacttcttcaacttcctgctcaacacaaccgactaccgaatcttgctcaaggacgaggaccacgaccgcatgtacgtgggcagcaaggactacgtgctgtccctggacctgcacgacatcaaccgcgagcccctcattatacactgggcagcctccccacagcgcatcgaggaatgcgtgctctcaggcaaggatgtcaacggcgagtgtgggaacttcgtcaggctcatccagccctggaaccgaacacacctgtatgtgtgcgggacaggtgcctacaaccccatgtgcacctatgtgaaccgcggacgccgcgcccaggattacatcttctacctggagcctgagcgactcgagtcagggaagggcaagtgtccgtacgatcccaagctggacacagcatcggccctcatcaatgaggagctctatgctggtgtgtacatcgattttatgggcactgatgcagccatcttccgcacacttggaaagcagacagccatgcgcacggatcagtacaactcccggtggctgaacgacccgtcgttcatccatgctgagctcattcctgacagtgcggagcgcaatgatgataagctttacttcttcttccgtgagcggtcggcagaggcgccgcagagccccgcggtgtacgcccgca

SEQ ID NO: 13934 - DNA, 3055 bp, Homo sapiens
ggcaccgcccacttcttcaacttcctgctcaacacaaccgactaccgaatcttgctcaaggacgaggaccacgaccgcatgtacgtgggcagcaaggactacgtgctgtccctggacctgcacgacatcaaccgcgagcccctcattgtaagggctggccctgatgtgggacgtggggtgggcacggagccccagggctcagggcatgtccagaaggctgcaccttctgacccccctctctgcagatacactgggcagcctccccacagcgcatcgaggaatgcgtgctctcaggcaaggatgtcaacgtgagtttggtgggatccacaggtgggaagggggaatccacaggtgggaaggtactgcccccagtgagggggcaggcctggccagggcacctatgcagccttccctgtggccccagggcgagtgtgggaacttcgtcaggctcatccagccctggaaccgaacacacctgtatgtgtgcgggacaggtgcctacaaccccatgtgcacctatgtgaaccgcggacgccgcgcccaggtaagccccagccaccctggccctgtgctgcccccgctggtggctgcatcccagggtcctgatgggaggaggggcttcagccccagccctgccacttccgagccttttgaccttgggtgagtgacttctttcacctcgctgagcctcagtttcttcacttgaaaatggggctaaccgctgcctttctcacaggtcggtgtgaggaggaggcagtgagctaaagctcccaaagctcctagcactgtgcctggcacatagtaagcacttgctccatatgtggcaacagctctcttggctatgcctgtggaccgtgccccgacggccgagccagagggcctggtgggggccttgcaataggaggctggacccctgggtcagcttctaccatgtggcctgggggagagctgccttccacccccagggccagggttgtggggagctgccccttccccagctctgccccttcctgcctgcttccacccttttccatttccatgtgggcatgtgtgtgagctggcgtgaacttgtagggcatgtgtgagaatgactggatctgaggggcacctgtgtgtgcaggtgtgtgccaagcctgtgtgtatgtatgtacacacgcatagacgtgctctggggggcccacgtgttcacgtgtgttcctggcctgtgtggtgttagaggctggcagcccgagcccgctcccccagcccctgccacccccagctctaacccctgttcctcgtcttctcaggccacaccatggacccagactcaggcggtcagaggccgcggcagcagagccacggatggtgccctccgcccgatgcccacagccccacgccaggtgggcctcatccctccaggcctttgccaggcagcactgcctctgagcggaactcaccctgggcctgcacctgaggccagcctccccagggcctcccctctacctctgtgcccacaccctgtccccaccccttcccctgaagagccctcaggctcagaaggcatgcccagctggactcatgtcagcctcagtgtgacccctgcaggcaagaaataatgaagccgccaggtggggaagacaggagccctggggacagccatgccttagccctcagaaagcatgtgtgtagacacacaagagcacacaccggtgtggatgtgggccttcctcactcagcacccagagtggaaagtggcacatgagtgcagtctgacaccttactcccaggtgttcgtgccccatgcctcccatgagtcatctgtggacacaggtgtcctgcacactcatgtgcttggggcgctcttctcccgtgtggtatctgtccactagtgatgacctgggtctgggctgggagagctggggctgggcaggggcgggcaggggggcaggggctgccggtgaatgacagagcatgtttgtggtggggagtgcagaaatgcaggatcgtgtggattctgtgtgtgtgtgtccatggtgtgagcaggcggttccgtgtgctggcggtgatatgttcagagctgtgtgtgcacccttgtgtgtgcaggaagtcacgtgtgcagtgtgtagctggaagtaggcctgtgtgcaccttcccatcgccatcctgccacctgctgccacctcctcctgcctctgttcctctctccttgcccctttccttccctctgcctggctttctcttgtggcctctgtgctcacccctgtcccagtgccttttccagccttcctagcatcttgcaggctgggctgggaggcacagggggctttgtgaattccatgtggtctgggctggactccttgactcctggctccctggggagatgtggagcctgggggctgtgctgagggacaggagaaaggtcatggcccattggtccatcctgaggaccacaggtaggacacaaagcctgaggatacagtaaccttagagctctctggcctggctagacctgatggcaaaggacaggaccccaggcccttaaccagtcactcctgccctggccaggtctgcagcgctttcttgacccaagacaggcagccacagcaaagagctgtgcctctgtagcccagggggccttggccagtgtctttatgagccagttggcatggaggggcttcagcccctacaagcccactccatgtccatctcatagcccacaaggcagggccccttgagacttggtccccaggtcttccctaagacctgggactaggaagcaccccccttggagcccacagcatggccctgccctgggagacctggctggatggagtttaaggccaaggaatgctggggagtgtagggggtgggctcggggtatgcctgggggctcattctcaccctgggagcctggtgacccttacacttcctggctgggggactggcctggacgatgctgagccccgctctgccttacaggattacatcttctacctggagcctgagcgactcgagtcagggaagggcaagtgtccgtacgatcccaagctggacacagcatcggccctcatca

SEQ ID NO: 13935 - DNA, 442 bp, Homo sapiens
ggcaccgcccacttcttcaacttcctgctcaacacaaccgactaccgaatcttgctcaaggacgaggaccacgaccgcatgtacgtgggcagcaaggactacgtgctgtccctggacctgcacgacatcaaccgcgagcccctcattatacactgggcagcctccccacagcgcatcgaggaatgcgtgctctcaggcaaggatgtcaacccttccctgtggccccagggcgagtgtgggaacttcgtcaggctcatccagccctggaaccgaacacacctgtatgtgtgcgggacaggtgcctacaaccccatgtgcacctatgtgaaccgcggacgccgcgcccaggattacatcttctacctggagcctgagcgactcgagtcagggaagggcaagtgtccgtacgatcccaagctggacacagcatcggccctcatca

SEQ ID NO: 13936 - DNA, 18546 bp, Homo sapiens
gcggccgcggcgccgatcccggctgaggcgcagcggcgagaggtcgcgggcagggccatggccccggggggccgctagcgcggaccggcccaacgggagccgctccgtgccgccgccgccgcccgggcgcccaggccccgccgctgcggaagaggtgagtgcagcgggaaccgggagggagcgggcaggcggccgggccaccccgcgacccctctgggacccgcggcactgcaactccgcagaagtgtccggggagcgggtctcgtcgagccggggggctgcccgcggacataggggcaacaaggctggggtgggattcttacctgtcctggaggcccggaccccttacctacggggcggcgtatggatgtgtggatgatgtggcctgcggggtcacccatgtgcaaagcaactttttcctgcaaggttctgggtgggtgctctcatacacccccaccttcacgcttctggagcgggagttccgatcccccttctgcctcagctctctctcccattaacgcccgaggcagcgctcttccccgtagatgcgcttgccctacctcagtgtctctacttgaggactggccagcccgaagggaagcggtatactggcagtccccacgtggggggtctcccacatcagcagagtgggaggacctccagtcctgaggcatttctcccagcattgtgccagccccttgacccccagctgccaccttgggtttgcttttacagcagagtcctgcctggattaggggcacggctgtatgtagtgtgtaggtgagcttggagagcctgcggtcaatccctagtttgaaccaggggtcccagtggtgaagtgggcaggggacagcgggggcttggcggggttgcccccagcagatgggacaggagggtatcaaagttggcctaggaatgaggcagtgctggcgggagttggctggagctggggctgggggccccactggataaataactcctaatttttgagatagctgtgttttgccaccagaacattactgcttgggagaggtaagggagacgccaaccaaagacaccagtatgtccaccctgaagctgggccaggttggggacctctgtcctcctgaattcacccagatagtctcccagtagttatcctagttgcagagaagggaaaactgcacccaggggttgggagccccatctcagcccagggagttggatggagctgaggcctcttcccaggctacccaaggggtgtgccaggaccccgtagggtatagtgtctaggcaggcggggggcacaggcatgcctactcctgctgctcccccttcagctccgaaggagccaggcccggaagtggggaggtgggggccggagagaaagcaggggccagagagaaggcggcagcccacccagcctcagcccctcgctgctcagcataccttggggggaggatggagccaggctcaggtgaccttgactgggaaaccctggccacaaaaggggggtttcagtcccagctatgctggggtggctctgcttcctggtccttgaggtgttgggggatggggaagctgaggagccaagaaggagacagagctcttgttgaagtgggggagggaatctgaggggctgggtagcgggtggggtgctgttgataatctccccatgttcccctacggcccctgttcctgcctcccttccatccaggcagtcctcagctcggaggagccaacctcccttcctggagacaggctgtccacccccacccccaactccaagcctgggcggtctggatccggctgtacagtttggccacctggccccctgtcccatcccaggtgcctccggactccttcctctggccgcctcttccctgcaccccttgccagccccggctcctcgtttctttgttcaagcgtctctcctccgtccctccctctctcctccctctctcctcctccctcccgcctgcctccctcccttgctccctcccaccagccttccttccctccttctctgctttcttcctggtgggctcccaggtggcggtggctgttcttcctctgtccactgacctgggcttggtgtgacttgggggcttttctggggctggggctgggtgacaggcatctcgggactggcagaggggaaggcactgtgggtttgccctttctttccctctctgtccttcttctccttttcttccttccctctccttctttcccccacctgccaggctgtccaagaggggacctggacttgagactgaggccccagcaaacttgagcccctccccattcacctctttaaaaggccaaagcatttggatgggaagtccctgtagggacccagtagaaagactccccacctctctggacacattgggtgactccaaccctgtccttggtgacactgactttgtcaccatgaacatggatgaaggaaaaaatgaggtcatggggaggggggaggcgggaggcaggttgacaggagcccccgttacatagtatcgaagctctctgagggactcagacggcatcttgcgccaggacagtatctcccagctcccctgagccccaccccactagcaggtcaagttcttgagcaaactcatgcttgtaaggacgtgtgtgggcctgcaagtgtgaacgtgtgcatatccacagctgttatcaggggcctcccaggtgcaccttgagggtgacggtggctgcacagccatttctcccacctgcccccacttctcagagcctgccattcagtcagcactagctttgtgcctcccagacctgaggaggggctggttctgattcccccatcccccagctagcctccccaggaggcagcatctatgacaggggatctggaaggaccatgagcggtgtgccaggccctcgggagagaacattcacacagagggtaccgcgtaaggagtgggccaagaggctgaagctgcacttcctgtctgaggagccatgagtggtttgccttggcaggagaggccagggctgggggaggtgggtctagggatgtcatcagggtctaatgagtggggcctaagagtcagactggagcctgggctttgcctcagcattgagcagctatggcaggggagtcccaggccatagtactgccaactcccatcccagcatcctagagatgggcctggggtcctgcctgccacggaagaagggagtacacagggcagatctgggggatggggctcacattttcagtctcgatgcccccacccgcagtgcatccggttgggggtggtggtaggagttggcgctggtttgtgccgggagggagcaatatgttctgacaactggtgctgggctgcgtttacccaacagccagcctgcctggggagacaatatttgaaaaacacagtattgaaacttggacctgctggggctatgggggattctgaaggtggcaatgccgctggcccagatccagccccaggcccactggccatcctagcttcccttctttgccctctagaggcggagctggaagttttccctggcaggaagtccttctgcctgtctgacctgggtctctcctgctttgattttagtacaagtggactctgccattctctgcctttccttttctgactggtgctccctctcttccatcttgggctgtctgcatgtgtctcattcccccactctctcctgtgcctcccctctaccgtaataatcaggtccaggtttctctgtactgggagaagacctgtggctggagcaggcagggatgcaccctatctgttccccattcctccaggtgggagggagaaggagtaacccactttattggccacagatgcaggggagaaaggagaaagcatgctgggagctggaaagagccctaagatcacctggttggtctgggccctgtgaatggaattcagcatgccatgaggggtagggtttgagtctccagcagcccccatcagttctggtgaccccaggctggggcctattggtactatctccccagacaaaggcaggccaaagaacgcacatgaggtgtgcacacaggggcattcatggccccaggctgggggtggaagcgtggaggtacccatcaacctctttgttcaccttgggtagaaattgaactcccccatctgcctcacacattccaatcttggttccccttcccaggtttctagagagtggagcctgcttcctgggccctaggcccctcccacaatgcttgtcgccggtcttcttctctgggcttccctactgaccggggcctggccatccttccccacccaggaccacctcccggccacgccccgggtccggctctcattcaaaggtaagaagctgttttgttcttccccagaaatcatcctctctttacaatagcgctcggctcctctgcacacgagagaaagggtgggtcaggacaaaaccaggacaaattgtacagccacataggttgtgggggagaagggagaccggggaggtggtggcttgctgggaaaggctggagaactgacccatttagacacttagcaaaagagtccagagtctgggcatcttccagagtcagactgtgggttcctgggctgggtggcctgaggtctgtagggcatgtctttctgtatgataattggagaggtggcaatgtcactccttccaaacttatgtctgctgcggcccctccttgccactgctatgcatctggtcctgccctgagcagcccctggggtggaaggtcaggcagttgggcagacactggaacctctggacactggaagagcaggacctgctctcttggggtgtgggtgctcgaggagccttcctatggtctccaagtgggaagggttcctagaatccaggaggggactgttggctgtgactggcagggaggccgccggtgggttcaggcagagcacgtgctgctgtgagggcctgagctcctgagctccagtgagcactttgatgagaagtcactgggaggtttcagtgatgggctggggtctgcagagtgagaggctggtcgcccgctccatcaccattgcacttaacccactggacaggtgcacgcacacggtacacacatgggtgtacaaatggctcactcgagagccacttcctcaagggtgtgtgtggtctgaagagtctcccctgggcccagggtgaggggcagtggccatgctggggcctgggggacctggggtcattgggagttctcagccttggccctcctctggccagaggtaacttcatccagccgcctgccctgggtggggtcgactcagccctggctggccagatttccgggcagccatactggggtgaaaggctggggtgacctttccttcctcgggcttggcggaggcccagccctcacctcaccatgtcccccagcagggcccctcccctggcctcgtcccaccctgccccttgatgggaggagtaggggagtaagctgcttatcatcactcttcccagtcacccggctcctggaatttctgaggctgtgcctggaaggagtcccctgcagggcctgagaaatgggctgagaagagttaatttgtttgggctggaaagcaccccccttccccgggccccaggaaggtgagatatttattctgctgatacctccacccttccctggtggaattcttcagagcagattaataaatcttgaaggggccagttcccccaaacccctccccagcccagggtctggcagcgagagtagagtgtctcctcccccgatagtggaagggaggggtggcttggtctccacacccctgggaccttgcgtccgctctgggtgttgtttttgtcatcatgcatgcaagtaagcaggaggggcaaaacagagaggggtcttccgtgtgctccttctaagcctccctggacctccaggggcaaagagttttgttcctgttttccagagagagaaactgaggctcaggcaagggcagggtcaaggtcaggcaagaggcagaggcaaagccagaaatagaaccctggtgtcctggccttgccggcgcccacatcgcgtcaggtcgattccctctcaattagctctgaagccgacacccgcagtgactaaaagctgagctcactggcagccagcctgggtgttgccggttgtggcggcctggggtggggctgcagcgcacctggggccacccatcccagggctcctgtgcctttgcacaggcaggttcccctgccctgaatgaccttccctgttccgacctggtctcgtgtcctaattttgtgcttagacttcacttactactgtatgacaggccccgtgctgagtgctggggactctgtggtgaacaagatagggtgctcacagtcaagctggtggaaaaagcaatggatatccagttggtcagggccatctgggagcccagcacctgctgtgtaccaggccctgtgtatccccctacactgggtggtctcagcctggttatgcacacatgaagtggccctcagtgaggagcaggcgcccaccaagtgtgtgtggagtgagaatggagaccaacacttcaagaaactgggctcccaccatcttcctcccagagtacacgtgggtggcacagagaaggttactctcagaagcactgctggtcactgtggctccatgtcatagttttttcatctgtgccttggatggacacagcagttgacaccccaggcctcaggggctcaggctgggcactccctgccctgccctgccctgggtcctgctgtagtggggaggtgccggttcctgcctgggtagggctggaccctccaagctagaggtgctggcataaggggccacactgcccagggtagataaaggaacaaaggcaggaactgggccaggcttgggtttgctgcccgcccatccgcctgggcaccccagccaggtctagagccagaagggtgtgagggtcaagcagcccagggttccctcagattaggggggctcctatggcccagcttctgggcttcagcagcacagccaaaatcaggcagaagtgagggtcaaatggagatttccaggagcaggtgaggtgtttgttcattccttgctcttgagagagtggagcctgggctggaagcctggacagaccctccttccttcacccatccatgcctgggcctggagtcccctacactgcagaatcactgccaaatctcagagaaaaagctcttccttcccccaccttgagatgacccaggctctggggcaccacctccctccgtggcagcagcagggaggtgtgagggccctgccaggccctttgttcagcctggggagtgtttactttttcccaggaagctaccccacgacacactgctgctgcctgggctgggtttggccagggattggggccaagagatgtttggtggggtagaaggaccctgtgatgacatgagacagttgtgctgctagggaagctgaggcagaagtagggagagggagcagaaggtcaccctgccaggggaggtcaggaaagatgaacataatcgaaatagtagtaggagcccatgaggataaccaagcaatggtccctccaagacctaaagagggtctgcctaggtttcctgtgaggaaggaggcttacgggggctgagcggcttcccaggtcactcaggagcaggactgagatggagcctgcatccgcctgatgcctgaggctgtcccaggactgagagtggagggcagggatggtggtggtgctggaggcacagacccttcacatgagctaggaacaaggaagattccagcattctgcagtgctggtttaggcttcctagcctcgtttcccaaagaaagggctggggtcgcactgggcaggctccccatgccctctgtctgccgaagcaacggaattggggtttgcttatttccaggctataaatccggccctccatcactctggcccttccactgagcagggtccctaggaaggcctctcatgtcagagatgggaacatcagggcctaagagaggaaagggctcctgttccagagcagcctggagtttgagccctccaggccaatagcccagaacagtgccaccgctcacatcatttgcatgtggcatcagaggaccaaggttgccaggtttggagatgatgaggttagaggttaggaagggtcacagcccgttgacttcccctcaggagttgatgtgagttgaggtgcctctagcaagccttgatggggccttagccctcaggcctggtgcaggagtaggggtggggctggagagctagaggacatgctcttgccccccaggggctccttggccagccagagcaaggcatggggctttggtgggggaggagggggaggaggcccaggagctttgaggccagtgtggcaccagggagctgggcaagggtcaggtggctctggcagctacagtgggggttggagctcacaagccagggagggtaggtgttccaggatacgccaggatgagggaggaaggaagacccaaagcatgaacttgagcccagatcccttgaggccagatctggagtttcagttttctggaaatgggagctgccttactcctgagagacttggaagtggccgctttggagttgggaggtcctggaagctgcacatcccccaactggctaggaattggtctttggagagaatggagacagggtccttgtgcttgctggagaacctgcctgacgcccagcctgggtcagccaggccaggggctggggctttcagctgtggccttccaggtcaagtggagcttcagatgggacctccactgtctgggcctccgcagcacaggccttgtctctggttccctggcatgatgcccgcccctccttccctggctccagcttcccttggcactaagtgaggagctggtgcatgctcaaggagtaaatcatgttccttggcagcccccactgcttcgtaatcgtaaagaatttaaagagaaaccgccaagataaaaatctcaccagcccataaaggcatctttcaccctgcagcttgggagacagtgagcctcagagtgggctcttggctgtctgcacctgtgtgtatgcacctccggccccttgactcctccagaggtggtaatagctcagaaggtggctttagggccatgggtacctggtccttgactcctgggagacctccatctcctcactcaggagagtggggtgcttaaatttggtgtaatgcagaagtggtgatggtggtggctgagctagctggtcccaaaggcaaaacccagttctaccagtgttagctgtgtgagttcagccaagtggcttagcctctctgagccctggtttctcctgtgtaaggtgggaatggcagtggccctgtggaagcagcatcatgagggctcagactgtcttgcttgcatcctggccatgggtggatcttgcttggtgaacatcattctgtgttcccactgccttttctggaaaatgggagtaagaacaatactggcctcgttgtgttgtcaggaggattaactgtgtgagtatggtcactgtggaagaaatctcagtcaccaggagcgatcctgaggctggtgtgcaggtgagggcaggtccaggggcatgccccaaggagtcccagactgcctcaccccttcctccagaattctaacttttggtaagggagatggtatttggaaaggactccaggaaggaccctgagtcctgtggggtgggtggagtagggtcaggaggaggaaaattcctaccatgggtatctgggcaggcttcatggaggaggctgcatcttgagcaggggaggggaggttgtaggggagggaagagctggagcacagggagggtgcatgtggtgcagcacctggggaagaggacagatgctagatgcagtcttgcttttgggacaaggatgtagagttctactttctgtttctggtttttaagctctttttcctcatggcagaggtactaaatatgtattatggaaaaattccagtgatacggatgcatttggcgggagtgatgccttggaagtagctccctagagactggctccaaggcctggttgggacgcacagttggctgcaataactccttctgtgaatgctgctccagctcctgccgtgtgtcctaggggtgaccagacctgggctgctcactcaggcatctgcagggctgggcagaaagcatgtttgcctggcttggcctggtgctatcctgggaatctgagccccgcctcaagaagccctgggagctttggagaagcagagaggattcctgctgcatttttcttagaaatagcaagagggcctttgccagaggcctggatgccagaaggctatggtctgaatccaaagcctagctcacgtgggtgccagagcttggcaggcctacagccccccacccagcctgctgggcagccccagggagagggtggaggcctcctgggctccagtccctgaccactggtcctgacccagcaacgaatggggtctgggcagtggctgctggcctaggattggggggctagcctgttggggagggagtggggctcatcgggctgacgggctgggctgacttctggcactctcactgggccgaggggagcactggctatctggtgcatctctgcagggcaaagacagacccaaagcaaccggcccctccagggatcaggaagcctcagctccggatcccccttcccccactcttcttccttccttcctccccctactcccccttgcctccacccctccctttgccacccctcttggcttcctacccggacatgctctttcctcggacgtctctgtacccagccaagagccttgttccttcccacttggggctcggtgctgatgccctcatttcccccggccagagtccactgcctcgtgtgtctgctgttcagccagcacggttgccttctaagggtcatacactacaattggcagagcggctagaatttgggagccctttgggctcctacagctccaaggctgagtggctagcactccagggggcctctcccagggctgcctgtattgccatttttatcagcgccttcctggctgggcctggggcctgtgcggagtgctcactgcctgcccttgactggctacctgctgagtcctgctgaggtcctaacccagcctcactgcatcctccaaggctgaccccaagcatgcacctgtctgccctgtgcctcggtttctccatcagaatgttggggaggggctaagactgtctggaacatcccgggaatctctgggtgggtgttgtgaaggggctgcagggaccgcaggaatccgaggaaggccgcagagatgggggctgggcccaggggagggggagggttttgacacccaccagcctgttggtcccatcttggcctgtctgtctgggtgatttatcagagtaaatgagccatggagagtttgttgtcttttgcagtcatggggaggaggaggtggtggaggaaggagtgaggggtttccgggccaggtctggaatgtgggaggaggaggtgggtcccccgggggcctctgaaactggaggcactcactgaatggccttttcactctccccacctgagaaatgaatcagtgcagccctccccttcagaacaatcccctctttccatccccttcatacttcttggggcacattcctgtgtgatctgcttgtctggtcatcttctcccaccccctgctcaggaccaggtctcttgaccacagtgtccttccaaagctgagccggagccctgacttgcccagctggtgaatgcccaaatgtgttctcacaggcaaccatgcacactgttaagttccaagtgggacgtctaggcctctggaactaccagcccaggcctaggatggtcaggtgcatggaccatggggaaggcaggggtcagtggaggtgccgaggccggagagaccccatctgctgggacagaaggtccgaagtcattgggtgtccttcggggatgaggcatggatcccctggttcccggctggcgagtcagggagtgatcctgctgctccgtcacttctggcttttcctggtttgaggctgagctgtgccctcagcctatcctgtcctgggcggagtaggtgagcactggggcggaacgggcgtgggaacagcatgcctggacctgctggccccagccccctgccccctgcccccagcctttagtcactgaaatgggagggaagtgtacagtggcgttttggcccagctgggctctttacccctgtacggtgtttactgaacagctgggatgtttacagtagcccttgcaaaggggcccctcgttgcaggggatttcccatcttgagggtcccactggggctcttctgacctcaccaattccctgcacccctgggatagatgtgtcagggatacagagaccataaccatctccaccttaccagagccagtggtgcctgtccccttggcctctggccttcggttcctctgctctggaggagccaacatttcccaccacatttcctagagtggcagctctaggtggtgaaatacggtaactgggtccccagttcagacatttaaattaaattcaatcagagcggttattgaataaaaacacgcggagtcatttacatgttaattatgttgaatggactactagaccataattagttgctaattgggtgagagtggctgtaattggttttgttggcaccaacctggctcacctacctggggggaagcgggggttggtgtggatggctcctagggaggccctctgggtctccaatctggaaggcctggctagagatgctatgcgggggcagatctccaggggcttagggtcagaggaacctggaacctctccccagggagggtgcagctggggtctggcttctagggttcccatccagagcatagggggaaaagggggaactggaggagctaccccagatcagcagtgatagtctcccctgcccagccccatgtgggacctgggcttgaacaaatggtaagtgcccaagagtgggtctgtgggagcccaaggcaggcgtcactcaggtgtgtctctgcacatactgggccctgggttggcctgatcagggtggcgttggggtgtaagtgggtgtgccaagcaggaggaaggtacgtacaaaggcatctgggcctccctgcccccccgcttagcttggctggggttcccggggttgtaggtctgtggccatgggctgaggccttccggctggccgctcattaaaagaggattaggctgagagccagggggccagcccagtccccaggccttcctctggggctcctcacagctttgggggagtgataaaagggccggggccaccccttcctggatcctgtgggggtatccggtagggaccacctgggccctgccatgcctcttgccgccactgctactatagccttggctacctcagtttccctcctcagaaggtcaggaggtctgtctttccggtgggtgaaacactgacaaagacccaggctggtgcctccccttgtcccccagtcccatctctcttcagctcagggattagggctgcactggctcactagaggtcagaggtctgagctaggctgcagggatctgtctatcatccccagtccccatcactgctgggggaggtgacgctgtcagtcagggcctgctgctttgtggggctataaccaagggggcgggctgcccacctctgctccaagactcctctttttgcggcagcccacacctcactgcacgcagacctgatgtcctggagaccagcagcaaggggtaggggctgcccacttggggtcttcgggtgagggctgtggacacgcctcctcagtgcctgtcctcacctgcccgcacctttaaagtaaggtatcaccagctgcttcccagatatgagggaccgggggcccccaggacccagccccgtgtgccttgagaaggtcctgcctctggacctgtgccaggccgctttgggctgggaccccaagtgcttgatggccatgagagagtcctggaggccaggaatggctgcggaaatgaggtgtctgatgccagaaaaggctcttccttcccgatgatgggaaaatccttcccggatgtcacccctcccaacctgtgcccagcctgggtgagagtatgggggtggggagcccttcccaggagacagcacccaggcacaccacccttcctccccctaaggtcaaagcttatctgggctggagtcctgatccccacagaacccttgattgtgcccagcccctccctcaacattgccatggcattcgaggaggcatggcgctcctgctgccagagccgggcgtgggacaagtggagcagatgtggggattggccttaggacatgaccaggctgggtctgcatcagccctggcccccactgatgccacctcaggtcccaggttcctttgttccttctgtcccaagtccctgtcccttaagggagctggggcctggtaggatctggcacctgctgatggcaggttttggaggaggatacccagggctacttgcccaccccctgctctgactcaggctgcttggaggagtgaaggctcccagttcctttgcctcatggtggagtggggagcaggggacaggacaccctgtgacctgggttgagtaccactctcctttgggcctcagtcttcctgtctgcagctgggggtgcagggctgtcacagggctccttgtttcccttttcacctacagtctggcatgagtggggtcagaagtccagctgtgggttgagaaggctggaaccttacaccttctttgctctgggacccggggaagttcccacccctctccaccttggttcccctctggtaggctgggtttggatgaatggtttgggatttagctctattcctgtgggttggggatggggtaaggacacactggagttgggaaggctggagctgagtccacaggttgcctcttcctgccttatagccctctctgctccccaatctagcactaggaaatggagtagctggggtgggaatggggatggatgccctacaagagatagcgacacgtggaagcctgcttccttggggaaggacttgggacctcattccactctcctttccctgaaaggcagagacacccatgaaggatgggttgggggaagacctgaggaatgccaggccgtgagcctctctctgagatcagaacggggtcactgatcctcagggtcactttgaatatcagtaccaggagggcctgagagatggtctagactagagaatgaggctcagagagcgagagtgcccccaactcaggtcatgaagctcacccagaaactcaagccatagccaaggatccctgatcctgggtcccaccccttccccaccatgcgcgacctcctggggctccccctccccccacactgtttccacagtgaccaaagcgtcacgtcctgtgacaccagagccattgacgccatatcccgtggccactgggaggggtcccgcaggtcctgagtcatgtgccctgtccacggggagcgagtcaccttccggccctggccctcctggcaggcagtctctaccaccaggactggcttcccctgggcctccccctccttcagccatggacctaggtgggaatcccacccccatgcactctggcatgtcacatcccttccctgtgccctgtgcccttggtattgtgagcacagggctttgtgcacagcgggtgttcgataactgagcaaggggctccctccacccccacctccacccaggggcagactgggggcagcaggcagagagggtcgaggccaatcctctgcccctaagctgggactcagtttcctcatcctctgagtgttctctacggcctttctcacagagggagctggagtttgggagtgctggggctttgcaagagggtaggggactcggacttgggcctcgggctctgggagtcttggtgcagggttgatattatagaggcccaaggctgcgcagggttggagcttggggattatggctgattgggttcctgggggcttaatggctgaagcttccccttacccggagtgcccgtgtctgaaggcgcccacttaagcctctagcccctccccctgccattgcccccaaagtgccccctagcccaggggatgggtaagggcatgaccgagccatgcccccagccagggtataaataacccctggcgggctgtcccagcctgggggggctccactggcagccccacttcctctctggccacttcccagccctgggggtgggggaatgtttactttcctgttgtcactgtgggtgagcagccaggcgggtgagcggccaggcgggggactccgagtggcccaacaacaggtgcgggacaggtgcctgggccgccctgcccaggacttcagaggcgccgctggacaggcgggtgaggccatcgccaggcaggatcggccctttgatccctcggcgtccctgcgtcccagcggttggccaaggtcatcacctgcattcccttgtcaccgcatagtcagggccaggcagggcaagacctttccttacccactagtttctcagagtgaggtcctgggaccagacatgggctctgggtcagctggtggaaccccctgaccccagcccacctctgccccaccttcaggctgtgtctagggcctcggatcccagctgttctccccctccaggtgccttggggcctggcccaggcctctcccttgactgccccacctgtgaaatgggttaccagctggggaggggagatgagacatgtgtgacccccttggtgagtgcctcatgtgtggtaggacatgtgtgcgccatgtgcatgcctgtgccacgtgtatacatgcatgcactcttctgtgtgctgctatcttaagccccctgtgtgtgtgaatattcatcatcctcattacagtgttccctcttttgctgagctaaagatagctgggggtgggtggagagggggcttgccaaggggacccctcggctctccctccccttggaggcaggttcccaagcttctaggagtcctttgtctgtcattgtctgagccccctcctgtccttcatccttaggaaggacttttccccagcatcctggagttggaggggccaaggctgctggactcatgcaaaagggaaactagaggacccagttgaaccctgcctttagccccagggttgtagctccagggagagagcctctttcccagaaatgactgtcctggctcattcaaggtggcctgagagttccaccattagcagccttatagggtctgggggaagctggggtccgtagggcagtgtgtccagcagggctttctggtctcctggctaacctgcttcagaccaagtgaggaccttgctgtgcaccagctgtgccctctgcctggtgggcagccagggtaagaacagggcatccaggctccatgccagagtctgccggctgtcccagatatacccggtcacacccctatctgctcattaacccttttaagcccctgtgtgaagctggccccaccctgagcgtgggagcattaacccccacctgagcaaaaactctttgatgctgttgcgtaccctggcccgcacctaccgccctttcattgggacccagagactagctagggctgtctatgaatcaggggtttagctttgggtgtggcgccttccctggcctgcctacctgtgccactttgtcctctcagtctgtcagggactggagagggagctgagaaggatccaggaaggggagctggaggtttaagaccactgtgtgggctgggcacagtggctcatgcctgtaatcccagcactttgggaggctgagacaggtggatcacgaggtcaggagttcgagaccagcctgaccaacatggagaaaccccatctctactaaaaatacaaaaattagctaggcgtggtggcgggcgcctgtgatcccaactactcaggaggctggggcagcagaatcgcttgaacccgggaggcgaaggttgcagtgagccaagatcgcgccattgcactccagcctgggtgacagagtgagactccatctcaaaaaacaaacaaacaaaaaataagctgggtgtggtggctgacgcctgtaatcccagctagtcaggaggctgagacaggagaatcgcttgaacccagcagatggaggttgcagtgagccgcaatctcgctactgtactgcagcctgggcaacagagtgagacttgatctcgtaaaaagaaaaaaagaaagaaagaaaaaagaccactctgtggtgggggtcctgaggggaacctcagggcctcagtctcccctttatcagagggggtatggctggatggtttcctgaaggtcctaattggtgccctgccctccacccacagagctgaaggccacaggcaccgcccacttcttcaacttcctgctcaacacaaccgactaccgaatcttgctcaaggacgaggaccacgaccgcatgtacgtgggcagcaaggactacgtgctgtccctggacctgcacgacatcaaccgcgagcccctcattgta

SEQ ID NO: 13937 - DNA, 757 bp, Homo sapiens
gcggccgcggcgccgatcccggctgaggcgcagcggcgagaggtcgcgggcagggccatggccccggggggccgctagcgcggaccggcccaacgggagccgctccgtgccgccgccgccgcccgggcgcccaggccccgccgctgcggaagaggtgagtgcagcgggaaccgggagggagcgggcaggcggccgggccaccccgcgacccctctgggacccgcggcactgcaactccgcagaagtgtccggggagcgggtctcgtcgagccggggggctgcccgcggacataggggcaacaaggctggggtgggattcttacctgtcctggaggcccggaccccttacctacggggcggcgtatggatgtgtggatgatgtggcctgcggggtcacccatgtgcaaagcaactttttcctgcaaggttctgggtttctagagagtggagcctgcttcctgggccctaggcccctcccacaatgcttgtcgccggtcttcttctctgggcttccctactgaccggggcctggccatccttccccacccaggaccacctcccggccacgccccgggtccggctctcattcaaagagctgaaggccacaggcaccgcccacttcttcaacttcctgctcaacacaaccgactaccgaatcttgctcaaggacgaggaccacgaccgcatgtacgtgggcagcaaggactacgtgctgtccctggacctgcacgacatcaaccgcgagcccctcattgta

SEQ ID NO: 13938 - DNA, 3541 bp, Homo sapiens
ctgactggtgctccctctcttccatcttgggctgtctgcatgtgtctcattcccccactctctcctgtgcctcccctctaccgtaataatcaggtccaggtttctctgtactgggagaagacctgtggctggagcaggcagggatgcaccctatctgttccccattcctccaggtgggagggagaaggagtaacccactttattggccacagatgcaggggagaaaggagaaagcatgctgggagctggaaagagccctaagatcacctggtttctagagagtggagcctgcttcctgggccctaggcccctcccacaatgcttgtcgccggtcttcttctctgggcttccctactgaccggggcctggccatccttccccacccaggaccacctcccggccacgccccgggtccggctctcattcaaagagctgaaggccacaggcaccgcccacttcttcaacttcctgctcaacacaaccgactaccgaatcttgctcaaggacgaggaccacgaccgcatgtacgtgggcagcaaggactacgtgctgtccctggacctgcacgacatcaaccgcgagcccctcattatacactgggcagcctccccacagcgcatcgaggaatgcgtgctctcaggcaaggatgtcaacggcgagtgtgggaacttcgtcaggctcatccagccctggaaccgaacacacctgtatgtgtgcgggacaggtgcctacaaccccatgtgcacctatgtgaaccgcggacgccgcgcccaggattacatcttctacctggagcctgagcgactcgagtcagggaagggcaagtgtccgtacgatcccaagctggacacagcatcggccctcatcaatgaggagctctatgctggtgtgtacatcgattttatgggcactgatgcagccatcttccgcacacttggaaagcagacagccatgcgcacggatcagtacaactcccggtggctgaacgacccgtcgttcatccatgctgagctcattcctgacagtgcggagcgcaatgatgataagctttacttcttcttccgtgagcggtcggcagaggcgccgcagagccccgcggtgtacgcccgcatcgggcgcatttgcctgaacgatgacggtggtcactgttgcctggtcaacaagtggagcacattcctgaaggcgcggctcgtctgctctgtcccgggcgaggatggcattgagactcactttgatgagctccaggacgtgtttgtccagcagacccaggacgtgaggaaccctgtcatttacgctgtctttacctcctctggctccgtgttccgaggctctgccgtgtgtgtctactccatggctgatattcgcatggtcttcaacgggccctttgcccacaaagaggggcccaactaccagtggatgcccttctcagggaagatgccctacccacggccgggcacgtgccctggtggaaccttcacgccatctatgaagtccaccaaggattatcctgatgaggtgatcaacttcatgcgcagccacccactcatgtaccaggccgtgtaccctctgcagcggcggcccctggtagtccgcacaggtgctccctaccgccttaccactattgccgtggaccaggtggatgcagccgacgggcgctatgaggtgcttttcctgggcacagaccgcgggacagtgcagaaggtcattgtgctgcccaaggatgaccaggagttggaggagctcatgctggaggaggtggaggtcttcaaggatccagcacccgtcaagaccatgaccatctcttctaagaggcaacaactctacgtggcgtcagccgtgggtgtcacacacctgagcctgcaccgctgccaggcgtatggggctgcctgtgctgactgctgccttgcccgggacccttactgtgcctgggatggccaggcctgctcccgctatacagcatcctccaagaggcggagccgccggcaggacgtccggcacggaaaccccatcaggcagtgccgtgggttcaactccaatgccaacaagaatgccgtggagtctgtgcagtatggcgtggccggcagcgcagccttccttgagtgccagccccgctcgccccaagccactgttaagtggctgttccagcgagatcctggtgaccggcgccgagagattcgtgcagaggaccgcttcctgcgcacagagcagggcttgttgctccgtgcactgcagctcagcgatcgtggcctctactcctgcacagccactgagaacaactttaagcacgtcgtcacacgagtgcagctgcatgtactgggccgggacgccgtccatgctgccctcttcccaccactgtccatgagcgccccgccacccccaggcgcaggccccccaacgcctccttaccaggagttagcccagctgctggcccagccagaagtgggcctcatccaccagtactgccagggttactggcgccatgtgccccccagccccagggaggctccaggggcaccccggtctcctgagccccaggaccagaaaaagccccggaaccgccggcaccaccctccggacacatgaggccagctgcctgtgcctgccatgggccagcctagcccttgtcccttttaatataaaagatatatatatatatatatatatataaaatatctatattctatacacaccctgcccctgcaaagacagtatttattggtgggttgaatatagcctgcctcagtggcagcatcctccaaaacttagacccatgctggtcagagacggcagaaaacagagcctgcctaaccaggcccagccagttggtggggccaggccaggaccacacagtccccagactcagctggaagtctacctgctggacagcctccgccaagatctacaggacaaagggagggagcaagccctactcggatggggcacggactgtccaccttttctgatgtgtgttgtcagcctgtgctgtggcatagacatggatgcgaggaccactttggagactggggtggcctcaagagcacacagagaagggaagaaggggccatcacaggatgccagcccctgcctgggttgggggcactcagccacgaccagccccttcctgggtatttattctctatttattggggataggagaagaggcatcctgcctgggtgggacagcctcttcagccccttctcccctccccgcctggccagggcagggccaccccactctacctccttagctttccctgtgccactttgactcagaggctgggagcatagcagaggggccaggcccaggcagagctgacgggaggccccagctctgaggggagggggtccgtggtagaggcctggggccggtagaggctccccagggctcccttatgtccaccacttcaggggatgggtgtggatgtaattagctctggggggcagttgggtagatgggtgggggctcctggtggccttctgctgcccaggccacagccgcctttgggttccatcttgctaataaacactggctctgggacta

SEQ ID NO: 13939 - DNA, 28505 bp, Homo sapiens
agcgccccgtcccgccggcggccgcgagaccagagcgagcgaacgaaccgcggcggtccggagagccccgagcgcagcgcaggacctgggtacgccgcgaggaaccgtgcagcccagcgcggccgcccggcccgggtccagcagccaggagagcgcagcgcttcgaagccgagtgcgcgccaccgcccgcgccccgcgctggggaatgcgccctcggcgcgccggccagggggcgcccgcagcccaccccaggggaggcggccccgagcgcccctgagccttcccatggcccgggctggggcccgggccctcggctgctgacgcgcccgaagcccgcggaaccggttaagccgcggccgcggcgccgatcccggctgaggcgcagcggcgagaggtcgcgggcagggccatggccccggggggccgctagcgcggaccggcccaacgggagccgctccgtgccgccgccgccgcccgggcgcccaggccccgccgctgcggaagaggtgagtgcagcgggaaccgggagggagcgggcaggcggccgggccaccccgcgacccctctgggacccgcggcactgcaactccgcagaagtgtccggggagcgggtctcgtcgagccggggggctgcccgcggacataggggcaacaaggctggggtgggattcttacctgtcctggaggcccggaccccttacctacggggcggcgtatggatgtgtggatgatgtggcctgcggggtcacccatgtgcaaagcaactttttcctgcaaggttctgggtgggtgctctcatacacccccaccttcacgcttctggagcgggagttccgatcccccttctgcctcagctctctctcccattaacgcccgaggcagcgctcttccccgtagatgcgcttgccctacctcagtgtctctacttgaggactggccagcccgaagggaagcggtatactggcagtccccacgtggggggtctcccacatcagcagagtgggaggacctccagtcctgaggcatttctcccagcattgtgccagccccttgacccccagctgccaccttgggtttgcttttacagcagagtcctgcctggattaggggcacggctgtatgtagtgtgtaggtgagcttggagagcctgcggtcaatccctagtttgaaccaggggtcccagtggtgaagtgggcaggggacagcgggggcttggcggggttgcccccagcagatgggacaggagggtatcaaagttggcctaggaatgaggcagtgctggcgggagttggctggagctggggctgggggccccactggataaataactcctaatttttgagatagctgtgttttgccaccagaacattactgcttgggagaggtaagggagacgccaaccaaagacaccagtatgtccaccctgaagctgggccaggttggggacctctgtcctcctgaattcacccagatagtctcccagtagttatcctagttgcagagaagggaaaactgcacccaggggttgggagccccatctcagcccagggagttggatggagctgaggcctcttcccaggctacccaaggggtgtgccaggaccccgtagggtatagtgtctaggcaggcggggggcacaggcatgcctactcctgctgctcccccttcagctccgaaggagccaggcccggaagtggggaggtgggggccggagagaaagcaggggccagagagaaggcggcagcccacccagcctcagcccctcgctgctcagcataccttggggggaggatggagccaggctcaggtgaccttgactgggaaaccctggccacaaaaggggggtttcagtcccagctatgctggggtggctctgcttcctggtccttgaggtgttgggggatggggaagctgaggagccaagaaggagacagagctcttgttgaagtgggggagggaatctgaggggctgggtagcgggtggggtgctgttgataatctccccatgttcccctacggcccctgttcctgcctcccttccatccaggcagtcctcagctcggaggagccaacctcccttcctggagacaggctgtccacccccacccccaactccaagcctgggcggtctggatccggctgtacagtttggccacctggccccctgtcccatcccaggtgcctccggactccttcctctggccgcctcttccctgcaccccttgccagccccggctcctcgtttctttgttcaagcgtctctcctccgtccctccctctctcctccctctctcctcctccctcccgcctgcctccctcccttgctccctcccaccagccttccttccctccttctctgctttcttcctggtgggctcccaggtggcggtggctgttcttcctctgtccactgacctgggcttggtgtgacttgggggcttttctggggctggggctgggtgacaggcatctcgggactggcagaggggaaggcactgtgggtttgccctttctttccctctctgtccttcttctccttttcttccttccctctccttctttcccccacctgccaggctgtccaagaggggacctggacttgagactgaggccccagcaaacttgagcccctccccattcacctctttaaaaggccaaagcatttggatgggaagtccctgtagggacccagtagaaagactccccacctctctggacacattgggtgactccaaccctgtccttggtgacactgactttgtcaccatgaacatggatgaaggaaaaaatgaggtcatggggaggggggaggcgggaggcaggttgacaggagcccccgttacatagtatcgaagctctctgagggactcagacggcatcttgcgccaggacagtatctcccagctcccctgagccccaccccactagcaggtcaagttcttgagcaaactcatgcttgtaaggacgtgtgtgggcctgcaagtgtgaacgtgtgcatatccacagctgttatcaggggcctcccaggtgcaccttgagggtgacggtggctgcacagccatttctcccacctgcccccacttctcagagcctgccattcagtcagcactagctttgtgcctcccagacctgaggaggggctggttctgattcccccatcccccagctagcctccccaggaggcagcatctatgacaggggatctggaaggaccatgagcggtgtgccaggccctcgggagagaacattcacacagagggtaccgcgtaaggagtgggccaagaggctgaagctgcacttcctgtctgaggagccatgagtggtttgccttggcaggagaggccagggctgggggaggtgggtctagggatgtcatcagggtctaatgagtggggcctaagagtcagactggagcctgggctttgcctcagcattgagcagctatggcaggggagtcccaggccatagtactgccaactcccatcccagcatcctagagatgggcctggggtcctgcctgccacggaagaagggagtacacagggcagatctgggggatggggctcacattttcagtctcgatgcccccacccgcagtgcatccggttgggggtggtggtaggagttggcgctggtttgtgccgggagggagcaatatgttctgacaactggtgctgggctgcgtttacccaacagccagcctgcctggggagacaatatttgaaaaacacagtattgaaacttggacctgctggggctatgggggattctgaaggtggcaatgccgctggcccagatccagccccaggcccactggccatcctagcttcccttctttgccctctagaggcggagctggaagttttccctggcaggaagtccttctgcctgtctgacctgggtctctcctgctttgattttagtacaagtggactctgccattctctgcctttccttttctgactggtgctccctctcttccatcttgggctgtctgcatgtgtctcattcccccactctctcctgtgcctcccctctaccgtaataatcaggtccaggtttctctgtactgggagaagacctgtggctggagcaggcagggatgcaccctatctgttccccattcctccaggtgggagggagaaggagtaacccactttattggccacagatgcaggggagaaaggagaaagcatgctgggagctggaaagagccctaagatcacctggttggtctgggccctgtgaatggaattcagcatgccatgaggggtagggtttgagtctccagcagcccccatcagttctggtgaccccaggctggggcctattggtactatctccccagacaaaggcaggccaaagaacgcacatgaggtgtgcacacaggggcattcatggccccaggctgggggtggaagcgtggaggtacccatcaacctctttgttcaccttgggtagaaattgaactcccccatctgcctcacacattccaatcttggttccccttcccaggtttctagagagtggagcctgcttcctgggccctaggcccctcccacaatgcttgtcgccggtcttcttctctgggcttccctactgaccggggcctggccatccttccccacccaggaccacctcccggccacgccccgggtccggctctcattcaaaggtaagaagctgttttgttcttccccagaaatcatcctctctttacaatagcgctcggctcctctgcacacgagagaaagggtgggtcaggacaaaaccaggacaaattgtacagccacataggttgtgggggagaagggagaccggggaggtggtggcttgctgggaaaggctggagaactgacccatttagacacttagcaaaagagtccagagtctgggcatcttccagagtcagactgtgggttcctgggctgggtggcctgaggtctgtagggcatgtctttctgtatgataattggagaggtggcaatgtcactccttccaaacttatgtctgctgcggcccctccttgccactgctatgcatctggtcctgccctgagcagcccctggggtggaaggtcaggcagttgggcagacactggaacctctggacactggaagagcaggacctgctctcttggggtgtgggtgctcgaggagccttcctatggtctccaagtgggaagggttcctagaatccaggaggggactgttggctgtgactggcagggaggccgccggtgggttcaggcagagcacgtgctgctgtgagggcctgagctcctgagctccagtgagcactttgatgagaagtcactgggaggtttcagtgatgggctggggtctgcagagtgagaggctggtcgcccgctccatcaccattgcacttaacccactggacaggtgcacgcacacggtacacacatgggtgtacaaatggctcactcgagagccacttcctcaagggtgtgtgtggtctgaagagtctcccctgggcccagggtgaggggcagtggccatgctggggcctgggggacctggggtcattgggagttctcagccttggccctcctctggccagaggtaacttcatccagccgcctgccctgggtggggtcgactcagccctggctggccagatttccgggcagccatactggggtgaaaggctggggtgacctttccttcctcgggcttggcggaggcccagccctcacctcaccatgtcccccagcagggcccctcccctggcctcgtcccaccctgccccttgatgggaggagtaggggagtaagctgcttatcatcactcttcccagtcacccggctcctggaatttctgaggctgtgcctggaaggagtcccctgcagggcctgagaaatgggctgagaagagttaatttgtttgggctggaaagcaccccccttccccgggccccaggaaggtgagatatttattctgctgatacctccacccttccctggtggaattcttcagagcagattaataaatcttgaaggggccagttcccccaaacccctccccagcccagggtctggcagcgagagtagagtgtctcctcccccgatagtggaagggaggggtggcttggtctccacacccctgggaccttgcgtccgctctgggtgttgtttttgtcatcatgcatgcaagtaagcaggaggggcaaaacagagaggggtcttccgtgtgctccttctaagcctccctggacctccaggggcaaagagttttgttcctgttttccagagagagaaactgaggctcaggcaagggcagggtcaaggtcaggcaagaggcagaggcaaagccagaaatagaaccctggtgtcctggccttgccggcgcccacatcgcgtcaggtcgattccctctcaattagctctgaagccgacacccgcagtgactaaaagctgagctcactggcagccagcctgggtgttgccggttgtggcggcctggggtggggctgcagcgcacctggggccacccatcccagggctcctgtgcctttgcacaggcaggttcccctgccctgaatgaccttccctgttccgacctggtctcgtgtcctaattttgtgcttagacttcacttactactgtatgacaggccccgtgctgagtgctggggactctgtggtgaacaagatagggtgctcacagtcaagctggtggaaaaagcaatggatatccagttggtcagggccatctgggagcccagcacctgctgtgtaccaggccctgtgtatccccctacactgggtggtctcagcctggttatgcacacatgaagtggccctcagtgaggagcaggcgcccaccaagtgtgtgtggagtgagaatggagaccaacacttcaagaaactgggctcccaccatcttcctcccagagtacacgtgggtggcacagagaaggttactctcagaagcactgctggtcactgtggctccatgtcatagttttttcatctgtgccttggatggacacagcagttgacaccccaggcctcaggggctcaggctgggcactccctgccctgccctgccctgggtcctgctgtagtggggaggtgccggttcctgcctgggtagggctggaccctccaagctagaggtgctggcataaggggccacactgcccagggtagataaaggaacaaaggcaggaactgggccaggcttgggtttgctgcccgcccatccgcctgggcaccccagccaggtctagagccagaagggtgtgagggtcaagcagcccagggttccctcagattaggggggctcctatggcccagcttctgggcttcagcagcacagccaaaatcaggcagaagtgagggtcaaatggagatttccaggagcaggtgaggtgtttgttcattccttgctcttgagagagtggagcctgggctggaagcctggacagaccctccttccttcacccatccatgcctgggcctggagtcccctacactgcagaatcactgccaaatctcagagaaaaagctcttccttcccccaccttgagatgacccaggctctggggcaccacctccctccgtggcagcagcagggaggtgtgagggccctgccaggccctttgttcagcctggggagtgtttactttttcccaggaagctaccccacgacacactgctgctgcctgggctgggtttggccagggattggggccaagagatgtttggtggggtagaaggaccctgtgatgacatgagacagttgtgctgctagggaagctgaggcagaagtagggagagggagcagaaggtcaccctgccaggggaggtcaggaaagatgaacataatcgaaatagtagtaggagcccatgaggataaccaagcaatggtccctccaagacctaaagagggtctgcctaggtttcctgtgaggaaggaggcttacgggggctgagcggcttcccaggtcactcaggagcaggactgagatggagcctgcatccgcctgatgcctgaggctgtcccaggactgagagtggagggcagggatggtggtggtgctggaggcacagacccttcacatgagctaggaacaaggaagattccagcattctgcagtgctggtttaggcttcctagcctcgtttcccaaagaaagggctggggtcgcactgggcaggctccccatgccctctgtctgccgaagcaacggaattggggtttgcttatttccaggctataaatccggccctccatcactctggcccttccactgagcagggtccctaggaaggcctctcatgtcagagatgggaacatcagggcctaagagaggaaagggctcctgttccagagcagcctggagtttgagccctccaggccaatagcccagaacagtgccaccgctcacatcatttgcatgtggcatcagaggaccaaggttgccaggtttggagatgatgaggttagaggttaggaagggtcacagcccgttgacttcccctcaggagttgatgtgagttgaggtgcctctagcaagccttgatggggccttagccctcaggcctggtgcaggagtaggggtggggctggagagctagaggacatgctcttgccccccaggggctccttggccagccagagcaaggcatggggctttggtgggggaggagggggaggaggcccaggagctttgaggccagtgtggcaccagggagctgggcaagggtcaggtggctctggcagctacagtgggggttggagctcacaagccagggagggtaggtgttccaggatacgccaggatgagggaggaaggaagacccaaagcatgaacttgagcccagatcccttgaggccagatctggagtttcagttttctggaaatgggagctgccttactcctgagagacttggaagtggccgctttggagttgggaggtcctggaagctgcacatcccccaactggctaggaattggtctttggagagaatggagacagggtccttgtgcttgctggagaacctgcctgacgcccagcctgggtcagccaggccaggggctggggctttcagctgtggccttccaggtcaagtggagcttcagatgggacctccactgtctgggcctccgcagcacaggccttgtctctggttccctggcatgatgcccgcccctccttccctggctccagcttcccttggcactaagtgaggagctggtgcatgctcaaggagtaaatcatgttccttggcagcccccactgcttcgtaatcgtaaagaatttaaagagaaaccgccaagataaaaatctcaccagcccataaaggcatctttcaccctgcagcttgggagacagtgagcctcagagtgggctcttggctgtctgcacctgtgtgtatgcacctccggccccttgactcctccagaggtggtaatagctcagaaggtggctttagggccatgggtacctggtccttgactcctgggagacctccatctcctcactcaggagagtggggtgcttaaatttggtgtaatgcagaagtggtgatggtggtggctgagctagctggtcccaaaggcaaaacccagttctaccagtgttagctgtgtgagttcagccaagtggcttagcctctctgagccctggtttctcctgtgtaaggtgggaatggcagtggccctgtggaagcagcatcatgagggctcagactgtcttgcttgcatcctggccatgggtggatcttgcttggtgaacatcattctgtgttcccactgccttttctggaaaatgggagtaagaacaatactggcctcgttgtgttgtcaggaggattaactgtgtgagtatggtcactgtggaagaaatctcagtcaccaggagcgatcctgaggctggtgtgcaggtgagggcaggtccaggggcatgccccaaggagtcccagactgcctcaccccttcctccagaattctaacttttggtaagggagatggtatttggaaaggactccaggaaggaccctgagtcctgtggggtgggtggagtagggtcaggaggaggaaaattcctaccatgggtatctgggcaggcttcatggaggaggctgcatcttgagcaggggaggggaggttgtaggggagggaagagctggagcacagggagggtgcatgtggtgcagcacctggggaagaggacagatgctagatgcagtcttgcttttgggacaaggatgtagagttctactttctgtttctggtttttaagctctttttcctcatggcagaggtactaaatatgtattatggaaaaattccagtgatacggatgcatttggcgggagtgatgccttggaagtagctccctagagactggctccaaggcctggttgggacgcacagttggctgcaataactccttctgtgaatgctgctccagctcctgccgtgtgtcctaggggtgaccagacctgggctgctcactcaggcatctgcagggctgggcagaaagcatgtttgcctggcttggcctggtgctatcctgggaatctgagccccgcctcaagaagccctgggagctttggagaagcagagaggattcctgctgcatttttcttagaaatagcaagagggcctttgccagaggcctggatgccagaaggctatggtctgaatccaaagcctagctcacgtgggtgccagagcttggcaggcctacagccccccacccagcctgctgggcagccccagggagagggtggaggcctcctgggctccagtccctgaccactggtcctgacccagcaacgaatggggtctgggcagtggctgctggcctaggattggggggctagcctgttggggagggagtggggctcatcgggctgacgggctgggctgacttctggcactctcactgggccgaggggagcactggctatctggtgcatctctgcagggcaaagacagacccaaagcaaccggcccctccagggatcaggaagcctcagctccggatcccccttcccccactcttcttccttccttcctccccctactcccccttgcctccacccctccctttgccacccctcttggcttcctacccggacatgctctttcctcggacgtctctgtacccagccaagagccttgttccttcccacttggggctcggtgctgatgccctcatttcccccggccagagtccactgcctcgtgtgtctgctgttcagccagcacggttgccttctaagggtcatacactacaattggcagagcggctagaatttgggagccctttgggctcctacagctccaaggctgagtggctagcactccagggggcctctcccagggctgcctgtattgccatttttatcagcgccttcctggctgggcctggggcctgtgcggagtgctcactgcctgcccttgactggctacctgctgagtcctgctgaggtcctaacccagcctcactgcatcctccaaggctgaccccaagcatgcacctgtctgccctgtgcctcggtttctccatcagaatgttggggaggggctaagactgtctggaacatcccgggaatctctgggtgggtgttgtgaaggggctgcagggaccgcaggaatccgaggaaggccgcagagatgggggctgggcccaggggagggggagggttttgacacccaccagcctgttggtcccatcttggcctgtctgtctgggtgatttatcagagtaaatgagccatggagagtttgttgtcttttgcagtcatggggaggaggaggtggtggaggaaggagtgaggggtttccgggccaggtctggaatgtgggaggaggaggtgggtcccccgggggcctctgaaactggaggcactcactgaatggccttttcactctccccacctgagaaatgaatcagtgcagccctccccttcagaacaatcccctctttccatccccttcatacttcttggggcacattcctgtgtgatctgcttgtctggtcatcttctcccaccccctgctcaggaccaggtctcttgaccacagtgtccttccaaagctgagccggagccctgacttgcccagctggtgaatgcccaaatgtgttctcacaggcaaccatgcacactgttaagttccaagtgggacgtctaggcctctggaactaccagcccaggcctaggatggtcaggtgcatggaccatggggaaggcaggggtcagtggaggtgccgaggccggagagaccccatctgctgggacagaaggtccgaagtcattgggtgtccttcggggatgaggcatggatcccctggttcccggctggcgagtcagggagtgatcctgctgctccgtcacttctggcttttcctggtttgaggctgagctgtgccctcagcctatcctgtcctgggcggagtaggtgagcactggggcggaacgggcgtgggaacagcatgcctggacctgctggccccagccccctgccccctgcccccagcctttagtcactgaaatgggagggaagtgtacagtggcgttttggcccagctgggctctttacccctgtacggtgtttactgaacagctgggatgtttacagtagcccttgcaaaggggcccctcgttgcaggggatttcccatcttgagggtcccactggggctcttctgacctcaccaattccctgcacccctgggatagatgtgtcagggatacagagaccataaccatctccaccttaccagagccagtggtgcctgtccccttggcctctggccttcggttcctctgctctggaggagccaacatttcccaccacatttcctagagtggcagctctaggtggtgaaatacggtaactgggtccccagttcagacatttaaattaaattcaatcagagcggttattgaataaaaacacgcggagtcatttacatgttaattatgttgaatggactactagaccataattagttgctaattgggtgagagtggctgtaattggttttgttggcaccaacctggctcacctacctggggggaagcgggggttggtgtggatggctcctagggaggccctctgggtctccaatctggaaggcctggctagagatgctatgcgggggcagatctccaggggcttagggtcagaggaacctggaacctctccccagggagggtgcagctggggtctggcttctagggttcccatccagagcatagggggaaaagggggaactggaggagctaccccagatcagcagtgatagtctcccctgcccagccccatgtgggacctgggcttgaacaaatggtaagtgcccaagagtgggtctgtgggagcccaaggcaggcgtcactcaggtgtgtctctgcacatactgggccctgggttggcctgatcagggtggcgttggggtgtaagtgggtgtgccaagcaggaggaaggtacgtacaaaggcatctgggcctccctgcccccccgcttagcttggctggggttcccggggttgtaggtctgtggccatgggctgaggccttccggctggccgctcattaaaagaggattaggctgagagccagggggccagcccagtccccaggccttcctctggggctcctcacagctttgggggagtgataaaagggccggggccaccccttcctggatcctgtgggggtatccggtagggaccacctgggccctgccatgcctcttgccgccactgctactatagccttggctacctcagtttccctcctcagaaggtcaggaggtctgtctttccggtgggtgaaacactgacaaagacccaggctggtgcctccccttgtcccccagtcccatctctcttcagctcagggattagggctgcactggctcactagaggtcagaggtctgagctaggctgcagggatctgtctatcatccccagtccccatcactgctgggggaggtgacgctgtcagtcagggcctgctgctttgtggggctataaccaagggggcgggctgcccacctctgctccaagactcctctttttgcggcagcccacacctcactgcacgcagacctgatgtcctggagaccagcagcaaggggtaggggctgcccacttggggtcttcgggtgagggctgtggacacgcctcctcagtgcctgtcctcacctgcccgcacctttaaagtaaggtatcaccagctgcttcccagatatgagggaccgggggcccccaggacccagccccgtgtgccttgagaaggtcctgcctctggacctgtgccaggccgctttgggctgggaccccaagtgcttgatggccatgagagagtcctggaggccaggaatggctgcggaaatgaggtgtctgatgccagaaaaggctcttccttcccgatgatgggaaaatccttcccggatgtcacccctcccaacctgtgcccagcctgggtgagagtatgggggtggggagcccttcccaggagacagcacccaggcacaccacccttcctccccctaaggtcaaagcttatctgggctggagtcctgatccccacagaacccttgattgtgcccagcccctccctcaacattgccatggcattcgaggaggcatggcgctcctgctgccagagccgggcgtgggacaagtggagcagatgtggggattggccttaggacatgaccaggctgggtctgcatcagccctggcccccactgatgccacctcaggtcccaggttcctttgttccttctgtcccaagtccctgtcccttaagggagctggggcctggtaggatctggcacctgctgatggcaggttttggaggaggatacccagggctacttgcccaccccctgctctgactcaggctgcttggaggagtgaaggctcccagttcctttgcctcatggtggagtggggagcaggggacaggacaccctgtgacctgggttgagtaccactctcctttgggcctcagtcttcctgtctgcagctgggggtgcagggctgtcacagggctccttgtttcccttttcacctacagtctggcatgagtggggtcagaagtccagctgtgggttgagaaggctggaaccttacaccttctttgctctgggacccggggaagttcccacccctctccaccttggttcccctctggtaggctgggtttggatgaatggtttgggatttagctctattcctgtgggttggggatggggtaaggacacactggagttgggaaggctggagctgagtccacaggttgcctcttcctgccttatagccctctctgctccccaatctagcactaggaaatggagtagctggggtgggaatggggatggatgccctacaagagatagcgacacgtggaagcctgcttccttggggaaggacttgggacctcattccactctcctttccctgaaaggcagagacacccatgaaggatgggttgggggaagacctgaggaatgccaggccgtgagcctctctctgagatcagaacggggtcactgatcctcagggtcactttgaatatcagtaccaggagggcctgagagatggtctagactagagaatgaggctcagagagcgagagtgcccccaactcaggtcatgaagctcacccagaaactcaagccatagccaaggatccctgatcctgggtcccaccccttccccaccatgcgcgacctcctggggctccccctccccccacactgtttccacagtgaccaaagcgtcacgtcctgtgacaccagagccattgacgccatatcccgtggccactgggaggggtcccgcaggtcctgagtcatgtgccctgtccacggggagcgagtcaccttccggccctggccctcctggcaggcagtctctaccaccaggactggcttcccctgggcctccccctccttcagccatggacctaggtgggaatcccacccccatgcactctggcatgtcacatcccttccctgtgccctgtgcccttggtattgtgagcacagggctttgtgcacagcgggtgttcgataactgagcaaggggctccctccacccccacctccacccaggggcagactgggggcagcaggcagagagggtcgaggccaatcctctgcccctaagctgggactcagtttcctcatcctctgagtgttctctacggcctttctcacagagggagctggagtttgggagtgctggggctttgcaagagggtaggggactcggacttgggcctcgggctctgggagtcttggtgcagggttgatattatagaggcccaaggctgcgcagggttggagcttggggattatggctgattgggttcctgggggcttaatggctgaagcttccccttacccggagtgcccgtgtctgaaggcgcccacttaagcctctagcccctccccctgccattgcccccaaagtgccccctagcccaggggatgggtaagggcatgaccgagccatgcccccagccagggtataaataacccctggcgggctgtcccagcctgggggggctccactggcagccccacttcctctctggccacttcccagccctgggggtgggggaatgtttactttcctgttgtcactgtgggtgagcagccaggcgggtgagcggccaggcgggggactccgagtggcccaacaacaggtgcgggacaggtgcctgggccgccctgcccaggacttcagaggcgccgctggacaggcgggtgaggccatcgccaggcaggatcggccctttgatccctcggcgtccctgcgtcccagcggttggccaaggtcatcacctgcattcccttgtcaccgcatagtcagggccaggcagggcaagacctttccttacccactagtttctcagagtgaggtcctgggaccagacatgggctctgggtcagctggtggaaccccctgaccccagcccacctctgccccaccttcaggctgtgtctagggcctcggatcccagctgttctccccctccaggtgccttggggcctggcccaggcctctcccttgactgccccacctgtgaaatgggttaccagctggggaggggagatgagacatgtgtgacccccttggtgagtgcctcatgtgtggtaggacatgtgtgcgccatgtgcatgcctgtgccacgtgtatacatgcatgcactcttctgtgtgctgctatcttaagccccctgtgtgtgtgaatattcatcatcctcattacagtgttccctcttttgctgagctaaagatagctgggggtgggtggagagggggcttgccaaggggacccctcggctctccctccccttggaggcaggttcccaagcttctaggagtcctttgtctgtcattgtctgagccccctcctgtccttcatccttaggaaggacttttccccagcatcctggagttggaggggccaaggctgctggactcatgcaaaagggaaactagaggacccagttgaaccctgcctttagccccagggttgtagctccagggagagagcctctttcccagaaatgactgtcctggctcattcaaggtggcctgagagttccaccattagcagccttatagggtctgggggaagctggggtccgtagggcagtgtgtccagcagggctttctggtctcctggctaacctgcttcagaccaagtgaggaccttgctgtgcaccagctgtgccctctgcctggtgggcagccagggtaagaacagggcatccaggctccatgccagagtctgccggctgtcccagatatacccggtcacacccctatctgctcattaacccttttaagcccctgtgtgaagctggccccaccctgagcgtgggagcattaacccccacctgagcaaaaactctttgatgctgttgcgtaccctggcccgcacctaccgccctttcattgggacccagagactagctagggctgtctatgaatcaggggtttagctttgggtgtggcgccttccctggcctgcctacctgtgccactttgtcctctcagtctgtcagggactggagagggagctgagaaggatccaggaaggggagctggaggtttaagaccactgtgtgggctgggcacagtggctcatgcctgtaatcccagcactttgggaggctgagacaggtggatcacgaggtcaggagttcgagaccagcctgaccaacatggagaaaccccatctctactaaaaatacaaaaattagctaggcgtggtggcgggcgcctgtgatcccaactactcaggaggctggggcagcagaatcgcttgaacccgggaggcgaaggttgcagtgagccaagatcgcgccattgcactccagcctgggtgacagagtgagactccatctcaaaaaacaaacaaacaaaaaataagctgggtgtggtggctgacgcctgtaatcccagctagtcaggaggctgagacaggagaatcgcttgaacccagcagatggaggttgcagtgagccgcaatctcgctactgtactgcagcctgggcaacagagtgagacttgatctcgtaaaaagaaaaaaagaaagaaagaaaaaagaccactctgtggtgggggtcctgaggggaacctcagggcctcagtctcccctttatcagagggggtatggctggatggtttcctgaaggtcctaattggtgccctgccctccacccacagagctgaaggccacaggcaccgcccacttcttcaacttcctgctcaacacaaccgactaccgaatcttgctcaaggacgaggaccacgaccgcatgtacgtgggcagcaaggactacgtgctgtccctggacctgcacgacatcaaccgcgagcccctcattgtaagggctggccctgatgtgggacgtggggtgggcacggagccccagggctcagggcatgtccagaaggctgcaccttctgacccccctctctgcagatacactgggcagcctccccacagcgcatcgaggaatgcgtgctctcaggcaaggatgtcaacgtgagtttggtgggatccacaggtgggaagggggaatccacaggtgggaaggtactgcccccagtgagggggcaggcctggccagggcacctatgcagccttccctgtggccccagggcgagtgtgggaacttcgtcaggctcatccagccctggaaccgaacacacctgtatgtgtgcgggacaggtgcctacaaccccatgtgcacctatgtgaaccgcggacgccgcgcccaggtaagccccagccaccctggccctgtgctgcccccgctggtggctgcatcccagggtcctgatgggaggaggggcttcagccccagccctgccacttccgagccttttgaccttgggtgagtgacttctttcacctcgctgagcctcagtttcttcacttgaaaatggggctaaccgctgcctttctcacaggtcggtgtgaggaggaggcagtgagctaaagctcccaaagctcctagcactgtgcctggcacatagtaagcacttgctccatatgtggcaacagctctcttggctatgcctgtggaccgtgccccgacggccgagccagagggcctggtgggggccttgcaataggaggctggacccctgggtcagcttctaccatgtggcctgggggagagctgccttccacccccagggccagggttgtggggagctgccccttccccagctctgccccttcctgcctgcttccacccttttccatttccatgtgggcatgtgtgtgagctggcgtgaacttgtagggcatgtgtgagaatgactggatctgaggggcacctgtgtgtgcaggtgtgtgccaagcctgtgtgtatgtatgtacacacgcatagacgtgctctggggggcccacgtgttcacgtgtgttcctggcctgtgtggtgttagaggctggcagcccgagcccgctcccccagcccctgccacccccagctctaacccctgttcctcgtcttctcaggccacaccatggacccagactcaggcggtcagaggccgcggcagcagagccacggatggtgccctccgcccgatgcccacagccccacgccaggtgggcctcatccctccaggcctttgccaggcagcactgcctctgagcggaactcaccctgggcctgcacctgaggccagcctccccagggcctcccctctacctctgtgcccacaccctgtccccaccccttcccctgaagagccctcaggctcagaaggcatgcccagctggactcatgtcagcctcagtgtgacccctgcaggcaagaaataatgaagccgccaggtggggaagacaggagccctggggacagccatgccttagccctcagaaagcatgtgtgtagacacacaagagcacacaccggtgtggatgtgggccttcctcactcagcacccagagtggaaagtggcacatgagtgcagtctgacaccttactcccaggtgttcgtgccccatgcctcccatgagtcatctgtggacacaggtgtcctgcacactcatgtgcttggggcgctcttctcccgtgtggtatctgtccactagtgatgacctgggtctgggctgggagagctggggctgggcaggggcgggcaggggggcaggggctgccggtgaatgacagagcatgtttgtggtggggagtgcagaaatgcaggatcgtgtggattctgtgtgtgtgtgtccatggtgtgagcaggcggttccgtgtgctggcggtgatatgttcagagctgtgtgtgcacccttgtgtgtgcaggaagtcacgtgtgcagtgtgtagctggaagtaggcctgtgtgcaccttcccatcgccatcctgccacctgctgccacctcctcctgcctctgttcctctctccttgcccctttccttccctctgcctggctttctcttgtggcctctgtgctcacccctgtcccagtgccttttccagccttcctagcatcttgcaggctgggctgggaggcacagggggctttgtgaattccatgtggtctgggctggactccttgactcctggctccctggggagatgtggagcctgggggctgtgctgagggacaggagaaaggtcatggcccattggtccatcctgaggaccacaggtaggacacaaagcctgaggatacagtaaccttagagctctctggcctggctagacctgatggcaaaggacaggaccccaggcccttaaccagtcactcctgccctggccaggtctgcagcgctttcttgacccaagacaggcagccacagcaaagagctgtgcctctgtagcccagggggccttggccagtgtctttatgagccagttggcatggaggggcttcagcccctacaagcccactccatgtccatctcatagcccacaaggcagggccccttgagacttggtccccaggtcttccctaagacctgggactaggaagcaccccccttggagcccacagcatggccctgccctgggagacctggctggatggagtttaaggccaaggaatgctggggagtgtagggggtgggctcggggtatgcctgggggctcattctcaccctgggagcctggtgacccttacacttcctggctgggggactggcctggacgatgctgagccccgctctgccttacaggattacatcttctacctggagcctgagcgactcgagtcagggaagggcaagtgtccgtacgatcccaagctggacacagcatcggccctcatcagtgagtgccccccaaccccgctctacagtctcaatgtgtggcctctgcccctggagatggggcatggcaccaacacttacccaagggcagagaccatgactaggctgtccctgaactccccaaaaggccccacctggcaagggggagagggtgcaggccagaccccactgtgagctgaggtcagagactgggtggtagaagcctccgcctggcccctttggatgggggaccaaggaagccaggtcctaccctgaaacacacaatgtggtccatgcaaagtccagaaccctcctgaccataggcttcctagaagagaagataagccgagtgcgtatcggggctggtctgaggggcagtcccatagcatgttcttggtgtgtctgagaggctgggagagccctgtagcgaaggaccaatggagagttccggccctgtgaccagacggggagagcatgttcctggtctgggtaggtgtctgggagggttgggggctgttctctgagtaggggtcctgccggggtctcaggagcagctgctgcccctaactgcaggttgggtgaacccatcactgaccctggctcatgcacgctgcctgttttctgattgttcaacacagtctgcctctcagagcagctgttgggcactgtgccacctccaagcctgggaaaggccctggggtcaaggggcagacattatcctccccctcttggcaagtgagaaggtcccagcctgatggcacagcccaaatcactctgatgaggaaagacagggcctgccctgggggagcctcagatgtggtatgttagaggcaagtacattattaaattttcaggaattttttgagccagttgttaaagacaactattattaaaagttaaggccaggctcagtggctcacacctataatcccagcactttgggaggctgaggggagtgtatcatttgaggtcaggagtttgagaccagcctggacaacatggtgaaaccctgtctctactaaaaaataaaaaataaaaaacattttttaaattatataagtttacgattaaacattaaaacaaaggtaacaacaataaaaagtaacaaacactcaaaactagccgggtgcggtggctcacacctataattccagcactttgggagacggaggcgggcggatcacctgagatcaggagctcgagaccaccctggccaacatggtgaaaccttgtctctactaaaaatacaaaaattagccaggcgtggtggcaggtgcctgtaatcccagctactagggaggctgaggcaggagaatcacttgaacctgggaggtggaggttgcagtgagctgagatcgtgccactgcactccagcctgggcaacagagtgagactccatttcaaaaaaaaagaaaagacttgaaaattgaaattgatctatgggctgcagaatggatgttgtgttagcaggcatgaaaacaacatttgtctccttgcacacctccatcagagctctgatggagaccaagaccaataagcagtaatattttgaaaggaatctttttttctgagcagtgggtttaaaatattcagaaaaccggccaggcacagtggctcatgcctgtaatcctaggactttgggaggctgaggcgggtggatcacttgaggtcaggagttcgagaccaggctggccaacatgggtgaaactctgtctctactaaaaatacaaaaattagccaggtgtggtggtgtgcacctgtaatcccagctacttgggaggctaaggcagaagaatagcttgaacctgggaggtggaagttgcagtgagctgagatcgcaccactgcactccagcctgggcaactgagcgagactctggctcaaaaaaaaaaaaaatcggtaaaccatgctgtaagcagatgtgctgtcattcaggctttgttgttatttatagagctcaggcagagtagattttgcaaaattctttttcttttttttttttttttttttgagatggagtctcgctctgtcgcccaggctggagtgcagtggtgtgatttcagctcactgcaagttccgcctcccgggttcacgccactctcctgcctcagcctcctgagtagctgggactacaggcacccgccaccatacccagctaatttttagtagagaccggggtttcaccgtgttagccaggatggtctcgatctcctgacctcgtgatccacctgtcttggcctcccaaagtgctgggattacaggcgtgagccaccacgcccacccctatttcacataattcttaagggccctagggttcttggaatggtaaatgagcactggcttcaacttaaagtaaccagctgcattagcccctaataagagagtctgactgtcgttcgaagctttgaagccaggaattgatttctccttgatagccgtgaaaatcctagatggcatgttcttccacgagaaggctgtttctttctttctttttttttttttttgagatggagtcttgccgtatttcccaggctggagtgcagtggcaccatcttggcttaccacaacccctgcctcctgggttcaagcgattctcctgcctcagcctcccaagtagctgggattacaggcgcatgccaccatgcccggctaatttttgtattattagtagagaaagcgtctcgccatgttgaccaggctggtcttgaactcctgacctaaagtgttcctcccacctccgcctcccaaaatgctgggataagaggtgtaagccactggccctggccagaaggctgttttatctgcattgaaaatcgtgtttagtgtagctcccttcatccatgatcttatctaaatcttctggaaaacttgctgcagcttctccatcagcacttgctacttcaccttgcatgtttatgttttggagatggctgctttccttaaacctcatgaaccagcctccgctggtttcaaacctttcttctccagcttcctctcttctctcagccttcatagaattgaagacagttagggctttgctctggattagactttggcttaaaggaatgttgtggctggtttgatcttccacgtaaaccagtaaaactttcaccatatcagtgataaggctgtttcactttcttatcatttgtgtgtttactggaatagcccttctaatttccttcaagaacttttcctttgcattcacaacttggctaactagtgctagcagcctagtttgggacctatctcagctttcaacatgctttccgtactaagcttaatcatttctagcttttttgtttttttttatttgtttgtttattttttgacagagttacactctgtcccccaggctagagtgaagtggcatgatcttggctcactgcaacctccaccccccgactccctgctccccggttcaagtgattttcctgccgcagcctcccaagtagctgggatcataggcgcccaccaccacctctggctaatttttatatttttagtagaagtgggttatgccatgttggccaggctggtctcctgacctcaagtgatcccctgcctcagcctcccaaagtgctaggattacaggcatgagccactgcacctggcccatttctagcttttgacttaaagtgagagataatatgactcttcctttcacttgaacacttagaggccattgtgggattattaattgatctaattttaatattgctgtgtcccagagaatggagaggcccaagaagagggagagagatgggagaatggccagtaagtggagcagtcagaacacacacagcatttatcgattaagttcactgttttatatgggtgaggttcacggtgccccgaaataattgcaatagtaacatcaaagatcactgatcacagatcaccataacagacagtttgaaatattgcaagaatcaccaaaatgtaggcaaggcgcggtggctcatgcctgtaatcccagccctttgggaggccgaggcaggtggatcacctgaggtcaggagttcgagaccagcctggccaacatggtgaaaccccgtctctactaaaaatacaaaaattagccagatgtagtggtgggcacctgtagtcccagctacttgggaggctgaggcaagagagttgcttgagcctgggaggtggaggttgtagtgagctgagatggtgccactgcactctagcctgggtgacagagcaagactccatctcaaaaaaaaaaaaaaagaagaattaccaaactgtgacacagacacagagacacaaagtaagcatatgctgttgaaaaaatggtgctaacagacttgcttgacacagggttgccacaaaccttccttctgtaaaaaatgcagtatttgcagtgcacaaagcccagtaaactgaggtgtgcatatgcttcctaattctttcactacactttattgttagctatgctctttttttgtttttttgtgttttttttttttatttttgttcctgctttttgagacggttgtctcactgtgtcaccaggctggagtgcagtggtgcgatctcggctcactacaacttccgcctcccaggtttaagggatcttcctgcctcagcctcctgagtagctgggactacatgcgtgcaccaccacgctcagctaatttttttgtatttttagtagaaacagggtttcaccacattggccaggatggtctcgatctcttgacctcatgatctgccagccttggcctcccaaagtgctgggattacaggaggcataagccaccatgcccggcctctttttttttttttaagatggagccttgctctgttgcccaggctggagtgcagtggcatgatctcgctcactgcaacctccgcctccctggttcaagcaattctcctgcctcagcctcccgtgtagctgggattacaggcacctgccaccatgcccagaaaatttctgtattttagtataggtagggtttcaccatcttggccaggctggcttccagctcctgccctcaaatgatccacccacctgggcctcccaaagtgctgggattataggcatgagccactgcagctggtctattagctatgctcttgaggtgatttacatttgttgtgtctgtggggtagaaatactgtacagtggtgttggcagctcttcctgattttgctttcagtgacctcaggttggtagcttgaaattagttgtggcaggagtattcacaccacagaaatgggctattgctactaatcagagctgatagttactaatcccaaccctcccagagccagtggtgaaacactgaccagcactccactggagataggatcatgccccagggagcctgagcggggagataaggccctgccctggaagtcatctgagctgtgccctggccctagcaaacagcagccccccaactgacccactggcctacccacagatgaggagctctatgctggtgtgtacatcgattttatgggcactgatgcagccatcttccgcacacttggaaagcagacagccatgcgcacggatcagtacaactcccggtggctgaacggtaagcgcagccccaggagcccttccgtggccatgtgtctgggatgcggcaaggaggtcgtaaagaagcacatgtgggggaagtggggacatgtttagcctatgactacctggggcaggggtagtttcttatctggagaggagttgggggtgttcttgcacctggctggggattctgttggagaacatcaggggcaccatcagagtaggggctcacccagctgacccctgccacctgcagacccgtcgttcatccatgctgagctcattcctgacagtgcggagcgcaatgatgataagctttacttcttcttccgtgagcggtcggcagaggcgccgcagagccccgcggtgtacgcccgcatcgggcgcatttgcctggtatgcattggcagagccaccaggctgccccttccaccagttctggcttcatcagccctgctccagccagggcttggggtcaagagctgatctgacccggcctcttgccccaccccccagaacgatgacggtggtcactgttgcctggtcaacaagtggagcacattcctgaaggcgcggctcgtctgctctgtcccgggcgaggatggcattgagactcactttgatgagctccgtgagtgcccagcaggcaggcagggtgctctggctacagcaagagggatagaggcgggatgggcgatcagggtgcctttggtgggccccctcccctgtgcaggagtgggtggggcccaggggctcccgcccatggcaccctccaacaccttctccctctgtccccagaggacgtgtttgtccagcagacccaggacgtgaggaaccctgtcatttacgctgtctttacctcctctgggtgaggctggggtcagggccagcagtggcagggagtggccccgttgggggattgtaactcgtggagaaccccagcccggtggcgagctgtggggagggggcagtttggggaggggccctaggtggagggtctgtcctgctcagcagcgcctgccatgcccacagctccgtgttccgaggctctgccgtgtgtgtctactccatggctgatattcgcatggtcttcaacgggccctttgcccacaaagaggggcccaactaccagtggatgcccttctcagggaagatgccctacccacggccgggcac

SEQ ID NO: 13940 - DNA, 1693 bp, Homo sapiens
agcgccccgtcccgccggcggccgcgagaccagagcgagcgaacgaaccgcggcggtccggagagccccgagcgcagcgcaggacctgggtacgccgcgaggaaccgtgcagcccagcgcggccgcccggcccgggtccagcagccaggagagcgcagcgcttcgaagccgagtgcgcgccaccgcccgcgccccgcgctggggaatgcgccctcggcgcgccggccagggggcgcccgcagcccaccccaggggaggcggccccgagcgcccctgagccttcccatggcccgggctggggcccgggccctcggctgctgacgcgcccgaagcccgcggaaccggttaagccgcggccgcggcgccgatcccggctgaggcgcagcggcgagaggtcgcgggcagggccatggccccggggggccgctagcgcggaccggcccaacgggagccgctccgtgccgccgccgccgcccgggcgcccaggccccgccgctgcggaagaggtttctagagagtggagcctgcttcctgggccctaggcccctcccacaatgcttgtcgccggtcttcttctctgggcttccctactgaccggggcctggccatccttccccacccaggaccacctcccggccacgccccgggtccggctctcattcaaagagctgaaggccacaggcaccgcccacttcttcaacttcctgctcaacacaaccgactaccgaatcttgctcaaggacgaggaccacgaccgcatgtacgtgggcagcaaggactacgtgctgtccctggacctgcacgacatcaaccgcgagcccctcattatacactgggcagcctccccacagcgcatcgaggaatgcgtgctctcaggcaaggatgtcaacggcgagtgtgggaacttcgtcaggctcatccagccctggaaccgaacacacctgtatgtgtgcgggacaggtgcctacaaccccatgtgcacctatgtgaaccgcggacgccgcgcccaggattacatcttctacctggagcctgagcgactcgagtcagggaagggcaagtgtccgtacgatcccaagctggacacagcatcggccctcatcaatgaggagctctatgctggtgtgtacatcgattttatgggcactgatgcagccatcttccgcacacttggaaagcagacagccatgcgcacggatcagtacaactcccggtggctgaacgacccgtcgttcatccatgctgagctcattcctgacagtgcggagcgcaatgatgataagctttacttcttcttccgtgagcggtcggcagaggcgccgcagagccccgcggtgtacgcccgcatcgggcgcatttgcctgaacgatgacggtggtcactgttgcctggtcaacaagtggagcacattcctgaaggcgcggctcgtctgctctgtcccgggcgaggatggcattgagactcactttgatgagctccaggacgtgtttgtccagcagacccaggacgtgaggaaccctgtcatttacgctgtctttacctcctctggctccgtgttccgaggctctgccgtgtgtgtctactccatggctgatattcgcatggtcttcaacgggccctttgcccacaaagaggggcccaactaccagtggatgcccttctcagggaagatgccctacccacggccgggcac

SEQ ID NO: 13941 - DNA, 1194 bp, Homo sapiens
cctaggaacaaccagagaggaaggagatgacaggggtggggagggggacatggaagggagtggtccgcttggccaaatgctgccacgaggtcatggcacctgaggccagggaggtggctgtggcatttggccacctgggaccttggccagagcaggacctgtagaggtcaggtgcagggcagaaacttggagagcgggtttggggagaggagcaggttgaggtagtggggacagacagtgcagcggcctcttctgaagctaatggctccagcctgccctgcccaggcagcctgggactgacactcgccacctgtccacagtgccctggtggaaccttcacgccatctatgaagtccaccaaggattatcctgatgaggtgatcaacttcatgcgcagccacccactcatgtaccaggccgtgtaccctctgcagcggcggcccctggtagtccgcacaggtgctccctaccgccttaccactattgccgtggaccaggtggatgcagccgacgggcgctatgaggtgcttttcctgggcacaggtacccactgctgctcccggcctctcccacgctgggcccaccgggtgcggggtgcagatccttggggctggggcttgccctgctagggcttgctgcaagctcatcagagtcacttcttcatcctcatcctttggtgccttctccctattgatgggataacagaggctaggggtgagaaaaccccattcccacttccatccccaggggcccaggagaacagggacactgggcatctggggacttatgtatgtatggcaggaaaggggtggagacagatggtaggcacctccaggatacagaggccatacacatgctcgtgtgtgcacacacatgccacagtgcaccccctacagttccagcagcccaaacacaggagaatgcatgccccagtgtcctgttctcagcagggcccaaaatcagggtctgggttggtgggggcagaccatggccatgaccccctatgtcctgggccagtcccctttgacctggggaaactcttccaccttggcacaaagctccagctccaatgccctaggggggtttgggccctggtgggggaaggggctgaggctggtaccccttccccagcatccccagccccactgaggccctgcccggcccgttccagaccgcgggacagtgcagaaggtc

SEQ ID NO: 13942 - DNA, 566 bp, Homo sapiens
cctaggaacaaccagagaggaaggagatgacaggggtggggagggggacatggaagggagtggtccgcttggccaaatgctgccacgaggtcatggcacctgaggccagggaggtggctgtggcatttggccacctgggaccttggccagagcaggacctgtagaggtcaggtgcagggcagaaacttggagagcgggtttggggagaggagcaggttgaggtagtggggacagacagtgcagcggcctcttctgaagctaatggctccagcctgccctgcccaggcagcctgggactgacactcgccacctgtccacagtgccctggtggaaccttcacgccatctatgaagtccaccaaggattatcctgatgaggtgatcaacttcatgcgcagccacccactcatgtaccaggccgtgtaccctctgcagcggcggcccctggtagtccgcacaggtgctccctaccgccttaccactattgccgtggaccaggtggatgcagccgacgggcgctatgaggtgcttttcctgggcacagaccgcgggacagtgcagaaggtc

SEQ ID NO: 13943 - DNA, 971 bp, Homo sapiens
ctgcagacccgtcgttcatccatgctgagctcattcctgacagtgcggagcgcaatgatgataagctttacttcttcttccgtgagcggtcggcagaggcgccgcagagccccgcggtgtacgcccgcatcgggcgcatttgcctggtatgcattggcagagccaccaggctgccccttccaccagttctggcttcatcagccctgctccagccagggcttggggtcaagagctgatctgacccggcctcttgccccaccccccagaacgatgacggtggtcactgttgcctggtcaacaagtggagcacattcctgaaggcgcggctcgtctgctctgtcccgggcgaggatggcattgagactcactttgatgagctccgtgagtgcccagcaggcaggcagggtgctctggctacagcaagagggatagaggcgggatgggcgatcagggtgcctttggtgggccccctcccctgtgcaggagtgggtggggcccaggggctcccgcccatggcaccctccaacaccttctccctctgtccccagaggacgtgtttgtccagcagacccaggacgtgaggaaccctgtcatttacgctgtctttacctcctctgggtgaggctggggtcagggccagcagtggcagggagtggccccgttgggggattgtaactcgtggagaaccccagcccggtggcgagctgtggggagggggcagtttggggaggggccctaggtggagggtctgtcctgctcagcagcgcctgccatgcccacagctccgtgttccgaggctctgccgtgtgtgtctactccatggctgatattcgcatggtcttcaacgggccctttgcccacaaagaggggcccaactaccagtggatgcccttctcagggaagatgccctacccacggccgggcacggtaaggaccccactcatcctgcctctcccctttctcttcttcta

SEQ ID NO: 13944 - DNA, 520 bp, Homo sapiens
ctgcagacccgtcgttcatccatgctgagctcattcctgacagtgcggagcgcaatgatgataagctttacttcttcttccgtgagcggtcggcagaggcgccgcagagccccgcggtgtacgcccgcatcgggcgcatttgcctgaacgatgacggtggtcactgttgcctggtcaacaagtggagcacattcctgaaggcgcggctcgtctgctctgtcccgggcgaggatggcattgagactcactttgatgagctccaggacgtgtttgtccagcagacccaggacgtgaggaaccctgtcatttacgctgtctttacctcctctggctccgtgttccgaggctctgccgtgtgtgtctactccatggctgatattcgcatggtcttcaacgggccctttgcccacaaagaggggcccaactaccagtggatgcccttctcagggaagatgccctacccacggccgggcacggtaaggaccccactcatcctgcctctcccctttctcttcttcta

SEQ ID NO: 13945 - DNA, 15276 bp, Homo sapiens
agcttccgcctggacccagcctcgtgggagccccgcgggtcctgcccaggtgagtggagccccagggcagatccagaaccaggattattgggatggggagtcctctctttccaggtggggtcaccggctcgcagggaggatctggggtagaagaggtcgcctcgcgaatgagagggtcgctgtgcgttacgcgtgtcggtgtgctcgggctcacctgggcgtgcctctctaagtgtatttcctgtgcagcacagaaagccattgtttccatttttgcctgagtgatcctcttaaacggcgaatcagatcgggcccctccttcacttaaaacccttgggtcatagagattaaaattcaaagtccactagtttttgcctagtctctcctcctgatctctccaacctcattgccctcctatctactccttcctcatcgtattccggctacaccagccgccttgatgatgtaaaatgtaaaaagcaagtccatctcagctccaggcctttacccttactgtacccctcacccaggcgactcctccaaatctttgcctaactgcctccttctgtactgaggtctcagttccaatgtcactttataggagaggctgtcctgtccagcctcctctatcacatctccctggcttatcactttcattgataactcttagaaatggtctgtcttctccattcatcttgtgctcgtttgcagtctgtcttgcgcagccgactgcaagctctggagggcagggtggtgccgagctttaatctccttagtcactgtatctctaggtcctagaacagagcctggtgcacagcaagtgctccagcaatggtcgtccaacgtcaaaagcgagtcctgcctacatctgtgtttgtgttgcctgtgctggtggttcccaccctccacgtcctccccacacgtggacacatgtttatgatccaactggaacatgaataatcccctctctcctctctctatgcttggtctgattcctgattctgcccgtttcttctcttccgtgcccgaataaatgatcccaaaggactcagaggcaggagatggcttagttggcctttggctgacctatggccaccctgtgtcctcaaactaaccagaaccttgccattgactcaacttcactctcactaagggagacacaagacaggaacttggggttgggaaactctgcgaccgaggctagccctggtccaggtgacaaacaggaagtgcgcaggcattgcaaagacacacctggcttcaggtatgcggcactggcagctggctccctgcccagcgctcctcccctaaagccacctagggctggtctgggaacttcctgctgactcaggaggcaggaatttctctgcagaccccaccagaagactttgcagggctgcagggagagcttgcaggagagtaagaagcagattatcttcttctggaccatccagagaaatctcccccaccagacacctgagacacactggccctgaggcctgtgagattatcgggaaactaccaaaatgtctgagatccaaattcaatcatcatgataaccacatgtatgggctccgaaatagaaggatctgcaaaggcaacattgctgtttgctgacattgctacaaaatgtgaccttttaaaaatcttaaccctggggttacattcttttttttttttttttttttgagacggagtcttgctctgtcacccaggctggagtgcagtggtgtgatctcggttcactgcagggtctgcctcctggattcaagcgattctctctcctcagcctcctgagtagctgggactacaggcacacgccaccatgcctggctaatttttgtatttttagtagagacggggtttcactgtgttgaccaggctggtctcaaactcctgacctcagatgatccacccacctctgcctcccaaagtgctaggattacaagagtgagccaccgcgcctggcccccagcgttgcattctaaagcaaagaataggggttagatctgcacctatcctgagaacctctgagtgtgcgcataggttgccgagaagccatggatgtttgtaagttaaattccccctgactgggatgttttttcacccagagtcacctggcacactccccagaattccttccagactttactcaatgagacctttcctggtcacatgatcaaaaatgttcacccagcctgggcaacgtggcaagacccaatctctacatatatatttaaaaattagccaggcacagccagacgcagtggctcatgctggtaatcccagtgctttgggaggctgaggagggtggatcacctgaggtcaggagttcgagaccagcctggccaacatggagaaaccccatctctattaaaaatattttaaaaattagccaggcatggtggcacacacctgtagtcccagctactgaggaggccgatgcacgagaattgcttgaaaccagcaggcggaagttgcaatgaactgagatcatgccactgcactccagcctgggcaacagagtgagacttgatctcaaaaaaaaaaaaaaaaaaaaaaattagccaggtacagtggcccacgctcatagtcccagctactcagaaggatgaggtgggagaatcacttgagcccaggaggtcaaggccgcaatgagctgtgattgcaccactgcagtccagcctgggcaataaagcaagactctgtctcaaaaaaaaaagagtgttcaccctagcacctgtactttcattatatcccatccatggtttagtttttttgtctagcactcactcatgtatgccatcatctagttcttttctgaggtgctgctccccagtagaatgtcagctcccaaggacagagatttccatctgttttgttcaatgctatgtctctagggcctagaacagagcctgggaccccataaggtgctgaataaataggggttcagtgaattcattaattacatttctgcaagatggggtggcatgttgtcatcttcagccattttttttttcttcgattgcattatatttggaacaggcacgatggtgacatctgtaatcccaactacttgggaggctgaggctagaggattccttgagcccaggaattcaaggctaaagtgtgctatgatcacacctgtgaatagcactgcactccagcctgggcaacacataagacctctctctttaaatgtaaaaaaaaaagtctgcgtgcagtggcttatgcctgtaatcccagcactttgggaggctgaggcaggtggatcacctgaggtcaggagttcaagaccagcctggcgaacacagtgaaaccctgtctctactacaaatataaaaaaagaaaaaacattagctgggtgtggtggtgcatgcctgtaatcccagctacttgggaggctgaggcaggagaatcgcttgaatctgggaggcagaggttgcagtgagccaagatcgcaccattgcactccagcctgggtgatagaatgagactctgtctcaaaaaaaaaaaaaaaaaaaaaaaaagatttgatggagctgtctccaaaattaagaagaggatgaaaggagctgacccagacactcaagcagggctaattattccccttttacagatgtggaagactgaggcctgttgaaagtgcagagctcagccctggcaccctctgttcccaagagctccatgcaggtgccacaggatggagaagaccttgctggccaaccttggtaccacggcctcctgtcccgccaggtaccacccacagcaggacctcagcaccatctggtggggagcctctcccacccttgctgaggattcctgggtccctggatgagggacttagtgccaaggtctattgggacaggtggcagagggctggggactgtcttgaaggttggctggctggggactgtcactatatttaaattatcactttctttgggatgatgagattggtgatggagcttaaggagagtcctaatgcccccaaactactcttggctctggccgtctctccctctgaactccatctacctcctggtatttccctctaaatgtgaggctcccaagccaggcatggtggctcacgcctgtaatcccaacagtttgaaaggccgaggtgggcggatcacttgaagtcaggagttcaagaccagcctggccaacattgtgaaaccccatctctaataaaaatacaaaaattagccagacatggtggtatgcgcctgtagtctcagctacttgggaggctgaggcaggagaatctcttgaacccaggaggcagaggttgtagtgagccacaattgtgccactgcactccagactgggtaacagagcgagactctgtcaaaaacataaataaataaacaaacaaataaatctgaggctcccacctccatctgaaactcagttgtcacccccaaaaattctgggaccctgagcatctcatgaaatcatgagaggcagtagaacttaatagttaaaatcccataattgagacccagacaccctaggttcaaatccaaaccctacaatttatattgtatgtgaccttgggcaggacatttgacctctctgggcctcagtctcccgatctttaacatagggatagcaggccaggcatgttggctcatgcctgtaatcccagcactttgggaggctgaggcaggaggatcacttgaggtcaggagttccaaaccagtctgggcaacatagcagaactctgtctctacacaaaaaaaaaaaaaaaagcgaaaattatccaggcatgggtggcatgtacctgttgtcccaactactcaggaggctgagatgggaggattgcttaagcccaggaggtcaaggctgtgagtgagccatgagtgctccactgcactcagcctgggcaatcgagagagaccttgactcaaaaaaaaaaaaaaaaaaaaaaggccggaagaaaaaaatgggccgggcatggtgactcatgcctgtaatcctagcactttgggaggccgaggtgggtagatcacctgaagtcaggagttcgagaccagcctgacctatatgatgaaaccccctctctactaaaaatacaaaaaagtagccaggcatggtggcatgcacctgtaatcccagctactcgggaggctgagacagcagaatcgcttgaacccaggaggcagaggttgcagtgagccgagattgtgccattgcactccagcctgagcaacaagagtgaaactccgtcccaaagaacaacaacaaaaaaaggtataataatacctaccacccttgttacaggaattacaagagttaacaccctttacatttaaagcagtgcttgacatatagtaagggctacacacgtgtgtctgctacatctattatttagtccccagaccccatgttcagctctactttgcctctctctggggtcctggcccttctacctgcctccccaagccttttttttgtttttttttttgttttttttttgtttttgagacatgatctcactctgtcacccatgctggagtgcaatggctccatctcggctcactgcaacctctgcctcctgggttcaagcgattctcccacctcagcctcctgagtagctggaatgacaggtgcacaccaccacgctcagctaatttttatattttttggtagagacagggttttgccatgttgcccaggctggtctcaaactcctgatctcaagtgatctgcctacctcagcctcccaaagtgctgggattacaggtgtgagccactgtgccccacccttcctaccctattttgacaccagccaccacagctggcataagactgcttgcaaatgtttataaaagagggggccccaatctggaagcatccagctaatggcttctcttgaagccacatttgcataacaagcacagtgcatttaccaaattagatgttgcattggtcagcatcagctagtggctgtaacaaacattcccaagatatcaccagctaaacacagtcaacatgttaatgtcatagtccaaggtggttgagaagcagagatgcaaagctccataaatcagttgggagccaagtgcatcttgtagctctgtcatccctctgggctttgggggatatcagctgacagacaggggacacaacctataagattgtgcagcagggttttatgcgccaggtctggatatttcccatagcccttctaccccacatcccattggccagttctcatcacatgacaaccctagccgcaagggaacctgggaaatgtagtctacgtaggtgccaggagaaagggggacagaacttggtgtgaaagttccccgtctttgcctgccacagaagtttcactggggtagcttttcttgggtggtgggggcaatggtggggggagctaccattaaccactgccctggactcattcctaattcccctgccccctgaacttcatccacagaaggctgaagctcttcttcagcaaaatggcgacttcctggttcgcgcctctgggtcccgtgggggcaaccccgtgatctcctgccgctggcggggctcagccctccattttgaggtgttccgtgtggccctgcgtccccggccaggccgacccacagccctctttcaactggaggatgagcaattccccagcataccggctctggttcacagttatatgacaggcaggcgcccactgtcccaggccacaggggctgtggtctccaggcctgtgacttggcaggggcctctgcgacgcagctttagcgaggacaccctgatggatggcccagctcggatagagcctctcaggtactcacagtctccctgcctccttgagaacacccaacactcgcagggttttccaactcaatggttgactttttttttttttgactgagtctcactctgttgcccaggctggagtgcagtggcatgatttcagctcactgcaacctccacctctcaggttcaagcgattctcctgcctcagcctccagagtagctgggattacaggagtgcaccaccacgcccagctaatttttttacttttttattttttatttttctctggagtcgaagtctcactctgttgcccaggctggagtgcaatggcacgatctcagcccactgcaacctccgcctcccgggttcaagcaattctcctgtctcagcttcccgagtagctgggattacaggcgtgcaccaccatgcctggctaattttttgtatttttagtagagacggggtttcaccatgttggccaggctggtctcaaactcctgacctcaagtgatccacccgcctcggcctcccaaagtgctgggattacaggcatgagccaccacgcctggctaattttttgtatttttagtagagacagggtttcaccatgttggcctggctggtcttgaacttttgacctcacgtgaccgcccgcctcagcctcccatagtgctgggattacaggtgtgagccaccgcacccggccttggttgacttttgaggcccgaacattcttagttgtgggggaggaggtggagatgtcctgtgcatcatagggtgctgagcagcattcctgagctccatccaactagatgctactagttgtgacaactaaagatgtctccacacgttgctaagagtcccctggacgtaggtcaccttgattggttgagactcactggtacagagtaactggacacagggttttgcagatattggtgggggacactgcttaggtggggactacaggtttctcccacttctgtcccccagggcaaggaagtggagcaacagtcagcctgcagatttggcacatatggggcggtcaagagaagaccccgctgggatgggtaagtgtctgctagaatggcctgtggctcagggattggctctgccactcaccacctaagagatcttggtcaggtgcaggcacctcttcgagcctcaatttcttgctttagaaaatgatgacaatcacgatgacttaaaacatgcagggactttgtgggtgcttaaaatgtgtgtttacaaggctgagcgcggtggctcatgcctgtaatcccagcactttgggaggccgaggccggtggatcacttgaggtcaggaattcgagaccagccttgccaacatggtgaaaccccatctccactaaaaacacaaaattagccgagcgtggtggcacgcacctgtaatcccagctactctggaggctgcggcaggagaatcgcttgaacctgggaggtggaggttgcagtgagccgagatggcgctaccgcactccagactgggtgacagaacaaaactccatctcaaaaaaaaaaaaaagtgtttacaattattccaaggagctgtacctgttctgaccacagcttaccttgctaacaacttctgctacgtaccctcctcatgctggtcacacagccctccttgcagttgttcgaaccctcaggcttttattcccgcctcggggcctttgcattttacatttccaccagtgacgggaacattctcattcccctaattttttcctgagtggctcctctccatccagggtaagttcctcaaagcagttgagtctgacggtcttacctaaaggaggactcacctgaatgccccctcatgccccttttttcccatccttctcccaaccccattcaacatgagccgtccctgcatcccaggccctgcacggagtgctaggatacatcaacaaaccagaaagagacaaagatccctgcccgatgggagccaacagtccacgagaggacaacaaaccatgaaccacaaaaataaggcaattttgtttgcttcaagatgaaaattaaaacacaggaagggaaggccaggcacagtggctcaggcctgtaatcccagcactttggaaggccaaggcgggcggatcacctaaagtcaggagttcgagaccagcctggccaacatggcgaaaccccgtctctactaaaactacaaaaattagccgggcgtggtggtacacacctgtaatcccagctactcgggagactcgggaggctgaggcacgagaattgcttgaacccgggaggcagaggttgccgtgagccaagattgcaccactgcactccagcctggacaacagagtgagactctgtctcaaaaaacaaacaaacaaacaaaaaacagtaagggaagggtgaggtggctcaggtctgtaatcctagcactttgggaggccaaggtgggcggatcacttgaggtcaggagttcgagaccagcctggccaacatggtgaaaacccatctctactaaaaaaaaataaaataaaataaaatacaaaaattagccaggtgtagtggcatatgcctgtaatccaagctacttgggacagagtgagactgtctcaaaaaaaccgaaaaaacaaaaacaaaacaaaacaaaaaaaacagagtaagggagatagagactataaagatggagatgtatattgcaattttattttatttctatttatttatttatttttgagatagagttttgctcttgttgcccaggatggagtgcaatggcgtgataccggctcactgcaacctccacctcctgggttcaagtgattctcctgcctcagcctcccgagtagctgggattacaggcatgtgcaccacgccctgctaattttgtatttttagtggagatggggtttccccatgttggtcaggctggtctcgaactcctgacctcaggtgatccacccacctcaacctcccaaagtgctgggattacaggcgtgagccattgtacccaagcaagcaattttaagtggtagtcaggaaaggccccattgcagaaaaaaataaaattgaaggaaatgagggagggaacaggtggataactgggggataagcaggcaggaggaagaggcagtgcaaaggctcttgggtcagaacaagaatttaagctgttcattcaaccaaaaaatgagtgggtagctgggtgtggtgttgcacgcctgtggtcctagccacttgggaggttgaagcaggaggactccttgaacccagaaagtcaaggctgcagtgagccgtgatcgcaccattgcactccagcctgggccacagagtgagaccctgactcaaatttaaaaaaaaaaaaaaaaagaagaagaaaagaaagggctgggtgcaatggctcaatttcttcttaaaaaaaaaaaaaaaaagatacacgtgcagaatgtgcaggttgagcctattcaaaggcatggtaaatacagtctcccaaaagtcttagtacagttttaagtactaatagtccagaaattacaagcctgtaatcccagcactttgggaggccaaagcgggcggatcacgaggtcaagagatcaagaccatcctggccaacatggtgaaaccccgtgtctactaaaaatacaaaaattagctgggtgtggtggcgcctgtggtcccagctactcgggaggctgaagcaggagaatcacttgaacccgggaggcagaggttgcaataagccgagatggcgccactgcactgtagcctggtgacagagtgagactccgtcaagaaagaaaagaaaggaaggaaggaaggaacgaagggagggagggaaggagggacacacgagtgtagctgaagcagagggaatgaggggagagtcagagagagagaccctggggctcagattgtgaggatttttcagctactgtgagcactttggaccttaactcagagtgagccaggcactgttggatgatttcaagttcctagaaaagagcctattcaaaggcatggtaaatacagtctcccaaaagtcttagtacagttttaagtactaatagtccaggagatcaacatgccaccaacttacaaaggacgtcatttgaaagtttacgatgaggggagggaacttagaggaggggtcagtaggtgcagcaaaccaccatggcacacagatactgaacctgcacattctgcacatgtatctttttttttaagaagaaataaaaaagaaaaaaaagaaaagaaagtttaataagcttggtttctttgacacttatctgagtgtcataccatacgcagctttgtgaattttttatactttgtctctctatagatatctatattaattgtatatattttatatagatatgtctatggagagatatattatcacaaaaaaagtaaaatatctatcatatataaatgtaattatatgtagtatatagggcaacattatacatttaataatgttaattttatttaacatatacttaatttaaatatatattatatatttatataatatatatctatctctatagatatgatatagagagatatatcacttaattgtagatagatagatatcttttttttttttttgagacagggtcttactctgtcatccaagctggagtgcagtggtgcagtcatacctcactgcagcctctggctcaagtgatcctcccacctctgcctcccaagtagctgggaccacaggtgcatgccaccatgcccagctaattttctaactttttgtagaaacaagatcttgttatgttgcccaggctggtctggaatccctagcctcaagcaatcctctcaccttggcctcccaaaatgctgagattacaggcgtcggccaccacgctcatcctttttttaaaaaaatttttaatttcgttgggtcactgcttaccatctttcagtcagaggggcaaaaacaaagaattcaaatttaaaatgtagtattcagaattcatagggtcaggcaaggtggctcatgcctgtgatcccagcagtttgggaggccgaggagggaggattgcttgagactaggaattccagaccagcctgggcaacacagtgagatcccatctctataaaataaaataaaattaaaaaaaaataatttacagaactatagagatgctaaagttttctaaccatgtgtaagcatgtagcatttctaccgtcgaggtggttgaaattcaaaactgcacccggataggttgttataccccattattggaatgagtggatggatcaggtgggtggtagccgatgaagctctcacccccgcccattcagcaatcttccctgtgtattcccattgacccctcttgtatgacctctagaagcctccaccatgcccatatctgccttgccccgaacgagcagtgacccggtgttgctgaaggcccctgctcccctgggaactgttgccgacagtctcagggcctccgatgggcagcttcaagccaaggcaccaacgaagcccccccggacaccctccttcgaactgcctgatgcctctgaacgtcccccgacgtactgcgagctggtgccccgagtgcccagtgtccagggaacatccccgagccaaagctgcccagagccagaggccccatggtgggaggccgaggaggatgaggaggaagagaatagatgttttacaagaccacaggctgagatctctttctgcccccatgatgccccctcctgcctgctgggcccccagaatcggcccctggaaccccaagtcctgcataccctccgtggcctgttcctggagcaccatcctgggagcaccgcccttcacctgctattggtagactgccaggtgggtcacctcctgggatgctcctccccaggcccagggcaagacccaaccatgcctacataatcacgcttcacctgacttccccattcccttctgcaggccacaggcctcctgggagtgaccagagatcagcggggcaacatgggagtctcatctggcctggagctgctcactcttccccatggacaccacttgaggttggaactgctggagaggtgagccagcagcttgtaatcttggttgggggaggccaattccccccacttcccaagatctccaaacagctccccactcatggttccccagggaagaagggagatggggcaatgccacctcctgtcccccctcacccctgcattacaaacctccccacttcccccagacccttgccctccacctctgcaggcatcagacactggcgctggccggggcgctggcggtgctgggctgctcggggccgctggaggagcgcgcagccgcactgaggggactggtagagctggcgctggcgctgcggccaggggcggcgggggacctgcccgggctggctgcagtcatgggcgccctgctcatgccccaggttcgtggggagcagggactggaggaagctggagtgcgggtgactgggaagactggagaggaggcgtgctcagatctcttctcccaggtgtcccggttggagcacacgtggcgccagctccgaaggagccacacggaggctgcgctggcctttgagcaggagctgaagccgctgatgcgggctctggatgagggcgctggtaagtgaaggtctggggcttagcatcccctgggggcccagaccaaatttaacaggactcaatctagtcctatgcccagtccctgcatctgttctaggcccggtcccttcaccataggccccgccctccacatgagggttggtcctggccctttccctaggccccgccctccacacgagacttgttcctaggccacgcccccaccagccttggtcccagcccctttccctaggctacgccccttcgccataggccccgccctccatacggggcgtgtggtcctggcccctctccacagaccccgctgtcgctcagtcctaagccccgcccctgcatttgtcctaggttccacctctgccctatgccccatctacagccccaaaccctgatcagaccctccccctccgcaggaccctgcgaccccggcgaggtggcgctgccgcacgtggcacccatggttcgcctactggagggcgaggaagtcgcggggccgctggacgagagctgtgagcggctgttgcgcaccctgcacggggcgcgtcacatggtccgggacgcacccaaattccgcaaggtggcagcccagcgcctgcgaggtgagcgttccctctgcgctggactgcagacttcagagcaccctgcaggttctaaccggatcccccaaacccagcctgtcccaggaggggagcctctcgccacgcctcccggagccccacccaaactgggacggctccactccaggaaggttctcaccccaagcaaacgctgcatccagcggtattgataggaacagggccgtccacctcaaaacgggctgtcctgcccccagagccacctccgcgggtccccactcccccttcccacctaagacgatcccgtcccccagggatctcgatccccaagaacgccctgctccctccaaaacgactcctccgtcctatcctagggcagcccacccggcaagatccccccaccttccccgacaacctgggatcccgtcctcggggcagccccacgtccaggcacagcccctaaggcgggacctccaggatctggcacctggaacaggccaccccattgcactgcggtagagcccctcaggcaccccacccccattcctgcagagagctggaagccccctcccctctgaccccgcctagtcatcccgcaggtggggcaggtccctcccgggcccctgttgggtcaaagtcctctggggaaaggaaggtgccgggaggttgggaggggcgaggcgggcgcctgggccccgcccccagcccacctgaccttgcttccaggattccggcctaacccggagctgagggaggccctgaccaccggcttcgtgcggaggctgctctggggtagccggggcgcgggagctccgcgcgctgaacgctttgagaagttccagcgcgtcctcggcgtcctgtcgcagcgcctggagcctgaccgctgagagcgcagacacccttcttcacacccgggacccccaggtttttgcgaaccccagaagagaccaaaggagtcgtcccaggctcctcgcgcctcaggtggaatcctgccctgtgcctcacagaagaggtggggaccgcagtcagggtcacctggaccatggtgaacatgtgacctgcagatctggcatcagaggccagagttcaaatgtgactccacctcttaaaagccgtgatttctagcagttgacttcacctctgtgtcggcctttaacaaaatcatagccatacagcagctcaggcctgtaatctcagcactttgggaggccgaggcggaaggaaggcttgaggccaggagttcaagaccagccagggcaacatggtgagacctcatctctacaaaaactgaaaaataaaaaacttttaaaaaatgtaaaa

SEQ ID NO: 13946 - DNA, 2281 bp, Homo sapiens
agcttccgcctggacccagcctcgtgggagccccgcgggtcctgcccagatgtggaagactgaggcctgttgaaagtgcagagctcagccctggcaccctctgttcccaagagctccatgcaggtgccacaggatggagaagaccttgctggccaaccttggtaccacggcctcctgtcccgccagaaggctgaagctcttcttcagcaaaatggcgacttcctggttcgcgcctctgggtcccgtgggggcaaccccgtgatctcctgccgctggcggggctcagccctccattttgaggtgttccgtgtggccctgcgtccccggccaggccgacccacagccctctttcaactggaggatgagcaattccccagcataccggctctggttcacagttatatgacaggcaggcgcccactgtcccaggccacaggggctgtggtctccaggcctgtgacttggcaggggcctctgcgacgcagctttagcgaggacaccctgatggatggcccagctcggatagagcctctcagggcaaggaagtggagcaacagtcagcctgcagatttggcacatatggggcggtcaagagaagaccccgctgggatggaagcctccaccatgcccatatctgccttgccccgaacgagcagtgacccggtgttgctgaaggcccctgctcccctgggaactgttgccgacagtctcagggcctccgatgggcagcttcaagccaaggcaccaacgaagcccccccggacaccctccttcgaactgcctgatgcctctgaacgtcccccgacgtactgcgagctggtgccccgagtgcccagtgtccagggaacatccccgagccaaagctgcccagagccagaggccccatggtgggaggccgaggaggatgaggaggaagagaatagatgttttacaagaccacaggctgagatctctttctgcccccatgatgccccctcctgcctgctgggcccccagaatcggcccctggaaccccaagtcctgcataccctccgtggcctgttcctggagcaccatcctgggagcaccgcccttcacctgctattggtagactgccaggccacaggcctcctgggagtgaccagagatcagcggggcaacatgggagtctcatctggcctggagctgctcactcttccccatggacaccacttgaggttggaactgctggagaggcatcagacactggcgctggccggggcgctggcggtgctgggctgctcggggccgctggaggagcgcgcagccgcactgaggggactggtagagctggcgctggcgctgcggccaggggcggcgggggacctgcccgggctggctgcagtcatgggcgccctgctcatgccccaggtgtcccggttggagcacacgtggcgccagctccgaaggagccacacggaggctgcgctggcctttgagcaggagctgaagccgctgatgcgggctctggatgagggcgctggaccctgcgaccccggcgaggtggcgctgccgcacgtggcacccatggttcgcctactggagggcgaggaagtcgcggggccgctggacgagagctgtgagcggctgttgcgcaccctgcacggggcgcgtcacatggtccgggacgcacccaaattccgcaaggtggcagcccagcgcctgcgaggattccggcctaacccggagctgagggaggccctgaccaccggcttcgtgcggaggctgctctggggtagccggggcgcgggagctccgcgcgctgaacgctttgagaagttccagcgcgtcctcggcgtcctgtcgcagcgcctggagcctgaccgctgagagcgcagacacccttcttcacacccgggacccccaggtttttgcgaaccccagaagagaccaaaggagtcgtcccaggctcctcgcgcctcaggtggaatcctgccctgtgcctcacagaagaggtggggaccgcagtcagggtcacctggaccatggtgaacatgtgacctgcagatctggcatcagaggccagagttcaaatgtgactccacctcttaaaagccgtgatttctagcagttgacttcacctctgtgtcggcctttaacaaaatcatagccatacagcagctcaggcctgtaatctcagcactttgggaggccgaggcggaaggaaggcttgaggccaggagttcaagaccagccagggcaacatggtgagacctcatctctacaaaaactgaaaaataaaaaacttttaaaaaatgtaaaa

SEQ ID NO: 13947 - DNA, 15271 bp, Homo sapiens
agcttccgcctggacccagcctcgtgggagccccgcgggtcctgcccaggtgagtggagccccagggcagatccagaaccaggattattgggatggggagtcctctctttccaggtggggtcaccggctcgcagggaggatctggggtagaagaggtcgcctcgcgaatgagagggtcgctgtgcgttacgcgtgtcggtgtgctcgggctcacctgggcgtgcctctctaagtgtatttcctgtgcagcacagaaagccattgtttccatttttgcctgagtgatcctcttaaacggcgaatcagatcgggcccctccttcacttaaaacccttgggtcatagagattaaaattcaaagtccactagtttttgcctagtctctcctcctgatctctccaacctcattgccctcctatctactccttcctcatcgtattccggctacaccagccgccttgatgatgtaaaatgtaaaaagcaagtccatctcagctccaggcctttacccttactgtacccctcacccaggcgactcctccaaatctttgcctaactgcctccttctgtactgaggtctcagttccaatgtcactttataggagaggctgtcctgtccagcctcctctatcacatctccctggcttatcactttcattgataactcttagaaatggtctgtcttctccattcatcttgtgctcgtttgcagtctgtcttgcgcagccgactgcaagctctggagggcagggtggtgccgagctttaatctccttagtcactgtatctctaggtcctagaacagagcctggtgcacagcaagtgctccagcaatggtcgtccaacgtcaaaagcgagtcctgcctacatctgtgtttgtgttgcctgtgctggtggttcccaccctccacgtcctccccacacgtggacacatgtttatgatccaactggaacatgaataatcccctctctcctctctctatgcttggtctgattcctgattctgcccgtttcttctcttccgtgcccgaataaatgatcccaaaggactcagaggcaggagatggcttagttggcctttggctgacctatggccaccctgtgtcctcaaactaaccagaaccttgccattgactcaacttcactctcactaagggagacacaagacaggaacttggggttgggaaactctgcgaccgaggctagccctggtccaggtgacaaacaggaagtgcgcaggcattgcaaagacacacctggcttcaggtatgcggcactggcagctggctccctgcccagcgctcctcccctaaagccacctagggctggtctgggaacttcctgctgactcaggaggcaggaatttctctgcagaccccaccagaagactttgcagggctgcagggagagcttgcaggagagtaagaagcagattatcttcttctggaccatccagagaaatctcccccaccagacacctgagacacactggccctgaggcctgtgagattatcgggaaactaccaaaatgtctgagatccaaattcaatcatcatgataaccacatgtatgggctccgaaatagaaggatctgcaaaggcaacattgctgtttgctgacattgctacaaaatgtgaccttttaaaaatcttaaccctggggttacattcttttttttttttttttttttgagacggagtcttgctctgtcacccaggctggagtgcagtggtgtgatctcggttcactgcagggtctgcctcctggattcaagcgattctctctcctcagcctcctgagtagctgggactacaggcacacgccaccatgcctggctaatttttgtatttttagtagagacggggtttcactgtgttgaccaggctggtctcaaactcctgacctcagatgatccacccacctctgcctcccaaagtgctaggattacaagagtgagccaccgcgcctggcccccagcgttgcattctaaagcaaagaataggggttagatctgcacctatcctgagaacctctgagtgtgcgcataggttgccgagaagccatggatgtttgtaagttaaattccccctgactgggatgttttttcacccagagtcacctggcacactccccagaattccttccagactttactcaatgagacctttcctggtcacatgatcaaaaatgttcacccagcctgggcaacgtggcaagacccaatctctacatatatatttaaaaattagccaggcacagccagacgcagtggctcatgctggtaatcccagtgctttgggaggctgaggagggtggatcacctgaggtcaggagttcgagaccagcctggccaacatggagaaaccccatctctattaaaaatattttaaaaattagccaggcatggtggcacacacctgtagtcccagctactgaggaggccgatgcacgagaattgcttgaaaccagcaggcggaagttgcaatgaactgagatcatgccactgcactccagcctgggcaacagagtgagacttgatctcaaaaaaaaaaaaaaaaaaaaaaattagccaggtacagtggcccacgctcatagtcccagctactcagaaggatgaggtgggagaatcacttgagcccaggaggtcaaggccgcaatgagctgtgattgcaccactgcagtccagcctgggcaataaagcaagactctgtctcaaaaaaaaaagagtgttcaccctagcacctgtactttcattatatcccatccatggtttagtttttttgtctagcactcactcatgtatgccatcatctagttcttttctgaggtgctgctccccagtagaatgtcagctcccaaggacagagatttccatctgttttgttcaatgctatgtctctagggcctagaacagagcctgggaccccataaggtgctgaataaataggggttcagtgaattcattaattacatttctgcaagatggggtggcatgttgtcatcttcagccattttttttttcttcgattgcattatatttggaacaggcacgatggtgacatctgtaatcccaactacttgggaggctgaggctagaggattccttgagcccaggaattcaaggctaaagtgtgctatgatcacacctgtgaatagcactgcactccagcctgggcaacacataagacctctctctttaaatgtaaaaaaaaaagtctgcgtgcagtggcttatgcctgtaatcccagcactttgggaggctgaggcaggtggatcacctgaggtcaggagttcaagaccagcctggcgaacacagtgaaaccctgtctctactacaaatataaaaaaagaaaaaacattagctgggtgtggtggtgcatgcctgtaatcccagctacttgggaggctgaggcaggagaatcgcttgaatctgggaggcagaggttgcagtgagccaagatcgcaccattgcactccagcctgggtgatagaatgagactctgtctcaaaaaaaaaaaaaaaaaaaaaaaaagatttgatggagctgtctccaaaattaagaagaggatgaaaggagctgacccagacactcaagcagggctaattattccccttttacagatgtggaagactgaggcctgttgaaagtgcagagctcagccctggcaccctctgttcccaagagctccatgcaggtgccacaggatggagaagaccttgctggccaaccttggtaccacggcctcctgtcccgccaggtaccacccacagcaggacctcagcaccatctggtggggagcctctcccacccttgctgaggattcctgggtccctggatgagggacttagtgccaaggtctattgggacaggtggcagagggctggggactgtcttgaaggttggctggctggggactgtcactatatttaaattatcactttctttgggatgatgagattggtgatggagcttaaggagagtcctaatgcccccaaactactcttggctctggccgtctctccctctgaactccatctacctcctggtatttccctctaaatgtgaggctcccaagccaggcatggtggctcacgcctgtaatcccaacagtttgaaaggccgaggtgggcggatcacttgaagtcaggagttcaagaccagcctggccaacattgtgaaaccccatctctaataaaaatacaaaaattagccagacatggtggtatgcgcctgtagtctcagctacttgggaggctgaggcaggagaatctcttgaacccaggaggcagaggttgtagtgagccacaattgtgccactgcactccagactgggtaacagagcgagactctgtcaaaaacataaataaataaacaaacaaataaatctgaggctcccacctccatctgaaactcagttgtcacccccaaaaattctgggaccctgagcatctcatgaaatcatgagaggcagtagaacttaatagttaaaatcccataattgagacccagacaccctaggttcaaatccaaaccctacaatttatattgtatgtgaccttgggcaggacatttgacctctctgggcctcagtctcccgatctttaacatagggatagcaggccaggcatgttggctcatgcctgtaatcccagcactttgggaggctgaggcaggaggatcacttgaggtcaggagttccaaaccagtctgggcaacatagcagaactctgtctctacacaaaaaaaaaaaaaaaagcgaaaattatccaggcatgggtggcatgtacctgttgtcccaactactcaggaggctgagatgggaggattgcttaagcccaggaggtcaaggctgtgagtgagccatgagtgctccactgcactcagcctgggcaatcgagagagaccttgactcaaaaaaaaaaaaaaaaaaaaaaggccggaagaaaaaaatgggccgggcatggtgactcatgcctgtaatcctagcactttgggaggccgaggtgggtagatcacctgaagtcaggagttcgagaccagcctgacctatatgatgaaaccccctctctactaaaaatacaaaaaagtagccaggcatggtggcatgcacctgtaatcccagctactcgggaggctgagacagcagaatcgcttgaacccaggaggcagaggttgcagtgagccgagattgtgccattgcactccagcctgagcaacaagagtgaaactccgtcccaaagaacaacaacaaaaaaaggtataataatacctaccacccttgttacaggaattacaagagttaacaccctttacatttaaagcagtgcttgacatatagtaagggctacacacgtgtgtctgctacatctattatttagtccccagaccccatgttcagctctactttgcctctctctggggtcctggcccttctacctgcctccccaagccttttttttgtttttttttttgttttttttttgtttttgagacatgatctcactctgtcacccatgctggagtgcaatggctccatctcggctcactgcaacctctgcctcctgggttcaagcgattctcccacctcagcctcctgagtagctggaatgacaggtgcacaccaccacgctcagctaatttttatattttttggtagagacagggttttgccatgttgcccaggctggtctcaaactcctgatctcaagtgatctgcctacctcagcctcccaaagtgctgggattacaggtgtgagccactgtgccccacccttcctaccctattttgacaccagccaccacagctggcataagactgcttgcaaatgtttataaaagagggggccccaatctggaagcatccagctaatggcttctcttgaagccacatttgcataacaagcacagtgcatttaccaaattagatgttgcattggtcagcatcagctagtggctgtaacaaacattcccaagatatcaccagctaaacacagtcaacatgttaatgtcatagtccaaggtggttgagaagcagagatgcaaagctccataaatcagttgggagccaagtgcatcttgtagctctgtcatccctctgggctttgggggatatcagctgacagacaggggacacaacctataagattgtgcagcagggttttatgcgccaggtctggatatttcccatagcccttctaccccacatcccattggccagttctcatcacatgacaaccctagccgcaagggaacctgggaaatgtagtctacgtaggtgccaggagaaagggggacagaacttggtgtgaaagttccccgtctttgcctgccacagaagtttcactggggtagcttttcttgggtggtgggggcaatggtggggggagctaccattaaccactgccctggactcattcctaattcccctgccccctgaacttcatccacagaaggctgaagctcttcttcagcaaaatggcgacttcctggttcgcgcctctgggtcccgtgggggcaaccccgtgatctcctgccgctggcggggctcagccctccattttgaggtgttccgtgtggccctgcgtccccggccaggccgacccacagccctctttcaactggaggatgagcaattccccagcataccggctctggttcacagttatatgacaggcaggcgcccactgtcccaggccacaggggctgtggtctccaggcctgtgacttggcaggggcctctgcgacgcagctttagcgaggacaccctgatggatggcccagctcggatagagcctctcaggtactcacagtctccctgcctccttgagaacacccaacactcgcagggttttccaactcaatggttgactttttttttttttgactgagtctcactctgttgcccaggctggagtgcagtggcatgatttcagctcactgcaacctccacctctcaggttcaagcgattctcctgcctcagcctccagagtagctgggattacaggagtgcaccaccacgcccagctaatttttttacttttttattttttatttttctctggagtcgaagtctcactctgttgcccaggctggagtgcaatggcacgatctcagcccactgcaacctccgcctcccgggttcaagcaattctcctgtctcagcttcccgagtagctgggattacaggcgtgcaccaccatgcctggctaattttttgtatttttagtagagacggggtttcaccatgttggccaggctggtctcaaactcctgacctcaagtgatccacccgcctcggcctcccaaagtgctgggattacaggcatgagccaccacgcctggctaattttttgtatttttagtagagacagggtttcaccatgttggcctggctggtcttgaacttttgacctcacgtgaccgcccgcctcagcctcccatagtgctgggattacaggtgtgagccaccgcacccggccttggttgacttttgaggcccgaacattcttagttgtgggggaggaggtggagatgtcctgtgcatcatagggtgctgagcagcattcctgagctccatccaactagatgctactagttgtgacaactaaagatgtctccacacgttgctaagagtcccctggacgtaggtcaccttgattggttgagactcactggtacagagtaactggacacagggttttgcagatattggtgggggacactgcttaggtggggactacaggtttctcccacttctgtcccccagggcaaggaagtggagcaacagtcagcctgcagatttggcacatatggggcggtcaagagaagaccccgctgggatgggtaagtgtctgctagaatggcctgtggctcagggattggctctgccactcaccacctaagagatcttggtcaggtgcaggcacctcttcgagcctcaatttcttgctttagaaaatgatgacaatcacgatgacttaaaacatgcagggactttgtgggtgcttaaaatgtgtgtttacaaggctgagcgcggtggctcatgcctgtaatcccagcactttgggaggccgaggccggtggatcacttgaggtcaggaattcgagaccagccttgccaacatggtgaaaccccatctccactaaaaacacaaaattagccgagcgtggtggcacgcacctgtaatcccagctactctggaggctgcggcaggagaatcgcttgaacctgggaggtggaggttgcagtgagccgagatggcgctaccgcactccagactgggtgacagaacaaaactccatctcaaaaaaaaaaaaaagtgtttacaattattccaaggagctgtacctgttctgaccacagcttaccttgctaacaacttctgctacgtaccctcctcatgctggtcacacagccctccttgcagttgttcgaaccctcaggcttttattcccgcctcggggcctttgcattttacatttccaccagtgacgggaacattctcattcccctaattttttcctgagtggctcctctccatccagggtaagttcctcaaagcagttgagtctgacggtcttacctaaaggaggactcacctgaatgccccctcatgccccttttttcccatccttctcccaaccccattcaacatgagccgtccctgcatcccaggccctgcacggagtgctaggatacatcaacaaaccagaaagagacaaagatccctgcccgatgggagccaacagtccacgagaggacaacaaaccatgaaccacaaaaataaggcaattttgtttgcttcaagatgaaaattaaaacacaggaagggaaggccaggcacagtggctcaggcctgtaatcccagcactttggaaggccaaggcgggcggatcacctaaagtcaggagttcgagaccagcctggccaacatggcgaaaccccgtctctactaaaactacaaaaattagccgggcgtggtggtacacacctgtaatcccagctactcgggagactcgggaggctgaggcacgagaattgcttgaacccgggaggcagaggttgccgtgagccaagattgcaccactgcactccagcctggacaacagagtgagactctgtctcaaaaaacaaacaaacaaacaaaaaacagtaagggaagggtgaggtggctcaggtctgtaatcctagcactttgggaggccaaggtgggcggatcacttgaggtcaggagttcgagaccagcctggccaacatggtgaaaacccatctctactaaaaaaaaataaaataaaataaaatacaaaaattagccaggtgtagtggcatatgcctgtaatccaagctacttgggacagagtgagactgtctcaaaaaaaccgaaaaaacaaaaacaaaacaaaacaaaaaaaacagagtaagggagatagagactataaagatggagatgtatattgcaattttattttatttctatttatttatttatttttgagatagagttttgctcttgttgcccaggatggagtgcaatggcgtgataccggctcactgcaacctccacctcctgggttcaagtgattctcctgcctcagcctcccgagtagctgggattacaggcatgtgcaccacgccctgctaattttgtatttttagtggagatggggtttccccatgttggtcaggctggtctcgaactcctgacctcaggtgatccacccacctcaacctcccaaagtgctgggattacaggcgtgagccattgtacccaagcaagcaattttaagtggtagtcaggaaaggccccattgcagaaaaaaataaaattgaaggaaatgagggagggaacaggtggataactgggggataagcaggcaggaggaagaggcagtgcaaaggctcttgggtcagaacaagaatttaagctgttcattcaaccaaaaaatgagtgggtagctgggtgtggtgttgcacgcctgtggtcctagccacttgggaggttgaagcaggaggactccttgaacccagaaagtcaaggctgcagtgagccgtgatcgcaccattgcactccagcctgggccacagagtgagaccctgactcaaatttaaaaaaaaaaaaaaaaagaagaagaaaagaaagggctgggtgcaatggctcaatttcttcttaaaaaaaaaaaaaaaaagatacacgtgcagaatgtgcaggttgagcctattcaaaggcatggtaaatacagtctcccaaaagtcttagtacagttttaagtactaatagtccagaaattacaagcctgtaatcccagcactttgggaggccaaagcgggcggatcacgaggtcaagagatcaagaccatcctggccaacatggtgaaaccccgtgtctactaaaaatacaaaaattagctgggtgtggtggcgcctgtggtcccagctactcgggaggctgaagcaggagaatcacttgaacccgggaggcagaggttgcaataagccgagatggcgccactgcactgtagcctggtgacagagtgagactccgtcaagaaagaaaagaaaggaaggaaggaaggaacgaagggagggagggaaggagggacacacgagtgtagctgaagcagagggaatgaggggagagtcagagagagagaccctggggctcagattgtgaggatttttcagctactgtgagcactttggaccttaactcagagtgagccaggcactgttggatgatttcaagttcctagaaaagagcctattcaaaggcatggtaaatacagtctcccaaaagtcttagtacagttttaagtactaatagtccaggagatcaacatgccaccaacttacaaaggacgtcatttgaaagtttacgatgaggggagggaacttagaggaggggtcagtaggtgcagcaaaccaccatggcacacagatactgaacctgcacattctgcacatgtatctttttttttaagaagaaataaaaaagaaaaaaaagaaaagaaagtttaataagcttggtttctttgacacttatctgagtgtcataccatacgcagctttgtgaattttttatactttgtctctctatagatatctatattaattgtatatattttatatagatatgtctatggagagatatattatcacaaaaaaagtaaaatatctatcatatataaatgtaattatatgtagtatatagggcaacattatacatttaataatgttaattttatttaacatatacttaatttaaatatatattatatatttatataatatatatctatctctatagatatgatatagagagatatatcacttaattgtagatagatagatatcttttttttttttttgagacagggtcttactctgtcatccaagctggagtgcagtggtgcagtcatacctcactgcagcctctggctcaagtgatcctcccacctctgcctcccaagtagctgggaccacaggtgcatgccaccatgcccagctaattttctaactttttgtagaaacaagatcttgttatgttgcccaggctggtctggaatccctagcctcaagcaatcctctcaccttggcctcccaaaatgctgagattacaggcgtcggccaccacgctcatcctttttttaaaaaaatttttaatttcgttgggtcactgcttaccatctttcagtcagaggggcaaaaacaaagaattcaaatttaaaatgtagtattcagaattcatagggtcaggcaaggtggctcatgcctgtgatcccagcagtttgggaggccgaggagggaggattgcttgagactaggaattccagaccagcctgggcaacacagtgagatcccatctctataaaataaaataaaattaaaaaaaaataatttacagaactatagagatgctaaagttttctaaccatgtgtaagcatgtagcatttctaccgtcgaggtggttgaaattcaaaactgcacccggataggttgttataccccattattggaatgagtggatggatcaggtgggtggtagccgatgaagctctcacccccgcccattcagcaatcttccctgtgtattcccattgacccctcttgtatgacctctagaagcctccaccatgcccatatctgccttgccccgaacgagcagtgacccggtgttgctgaaggcccctgctcccctgggaactgttgccgacagtctcagggcctccgatgggcagcttcaagccaaggcaccaacgaagcccccccggacaccctccttcgaactgcctgatgcctctgaacgtcccccgacgtactgcgagctggtgccccgagtgcccagtgtccagggaacatccccgagccaaagctgcccagagccagaggccccatggtgggaggccgaggaggatgaggaggaagagaatagatgttttacaagaccacaggctgagatctctttctgcccccatgatgccccctcctgcctgctgggcccccagaatcggcccctggaaccccaagtcctgcataccctccgtggcctgttcctggagcaccatcctgggagcaccgcccttcacctgctattggtagactgccaggtgggtcacctcctgggatgctcctccccaggcccagggcaagacccaaccatgcctacataatcacgcttcacctgacttccccattcccttctgcaggccacaggcctcctgggagtgaccagagatcagcggggcaacatgggagtctcatctggcctggagctgctcactcttccccatggacaccacttgaggttggaactgctggagaggtgagccagcagcttgtaatcttggttgggggaggccaattccccccacttcccaagatctccaaacagctccccactcatggttccccagggaagaagggagatggggcaatgccacctcctgtcccccctcacccctgcattacaaacctccccacttcccccagacccttgccctccacctctgcaggcatcagacactggcgctggccggggcgctggcggtgctgggctgctcggggccgctggaggagcgcgcagccgcactgaggggactggtagagctggcgctggcgctgcggccaggggcggcgggggacctgcccgggctggctgcagtcatgggcgccctgctcatgccccaggttcgtggggagcagggactggaggaagctggagtgcgggtgactgggaagactggagaggaggcgtgctcagatctcttctcccaggtgtcccggttggagcacacgtggcgccagctccgaaggagccacacggaggctgcgctggcctttgagcaggagctgaagccgctgatgcgggctctggatgagggcgctggtaagtgaaggtctggggcttagcatcccctgggggcccagaccaaatttaacaggactcaatctagtcctatgcccagtccctgcatctgttctaggcccggtcccttcaccataggccccgccctccacatgagggttggtcctggccctttccctaggccccgccctccacacgagacttgttcctaggccacgcccccaccagccttggtcccagcccctttccctaggctacgccccttcgccataggccccgccctccatacggggcgtgtggtcctggcccctctccacagaccccgctgtcgctcagtcctaagccccgcccctgcatttgtcctaggttccacctctgccctatgccccatctacagccccaaaccctgatcagaccctccccctccgcaggaccctgcgaccccggcgaggtggcgctgccgcacgtggcacccatggttcgcctactggagggcgaggaagtcgcggggccgctggacgagagctgtgagcggctgttgcgcaccctgcacggggcgcgtcacatggtccgggacgcacccaaattccgcaaggtggcagcccagcgcctgcgaggtgagcgttccctctgcgctggactgcagacttcagagcaccctgcaggttctaaccggatcccccaaacccagcctgtcccaggaggggagcctctcgccacgcctcccggagccccacccaaactgggacggctccactccaggaaggttctcaccccaagcaaacgctgcatccagcggtattgataggaacagggccgtccacctcaaaacgggctgtcctgcccccagagccacctccgcgggtccccactcccccttcccacctaagacgatcccgtcccccagggatctcgatccccaagaacgccctgctccctccaaaacgactcctccgtcctatcctagggcagcccacccggcaagatccccccaccttccccgacaacctgggatcccgtcctcggggcagccccacgtccaggcacagcccctaaggcgggacctccaggatctggcacctggaacaggccaccccattgcactgcggtagagcccctcaggcaccccacccccattcctgcagagagctggaagccccctcccctctgaccccgcctagtcatcccgcaggtggggcaggtccctcccgggcccctgttgggtcaaagtcctctggggaaaggaaggtgccgggaggttgggaggggcgaggcgggcgcctgggccccgcccccagcccacctgaccttgcttccaggattccggcctaacccggagctgagggaggccctgaccaccggcttcgtgcggaggctgctctggggtagccggggcgcgggagctccgcgcgctgaacgctttgagaagttccagcgcgtcctcggcgtcctgtcgcagcgcctggagcctgaccgctgagagcgcagacacccttcttcacacccgggacccccaggtttttgcgaaccccagaagagaccaaaggagtcgtcccaggctcctcgcgcctcaggtggaatcctgccctgtgcctcacagaagaggtggggaccgcagtcagggtcacctggaccatggtgaacatgtgacctgcagatctggcatcagaggccagagttcaaatgtgactccacctcttaaaagccgtgatttctagcagttgacttcacctctgtgtcggcctttaacaaaatcatagccatacagcagctcaggcctgtaatctcagcactttgggaggccgaggcggaaggaaggcttgaggccaggagttcaagaccagccagggcaacatggtgagacctcatctctacaaaaactgaaaaataaaaaacttttaaaaaatg

SEQ ID NO: 13948 - DNA, 2013 bp, Homo sapiens
agcttccgcctggacccagcctcgtgggagccccgcgggtcctgcccagatgtggaagactgaggcctgttgaaagtgcagagctcagccctggcaccctctgttcccaagagctccatgcaggtgccacaggatggagaagaccttgctggccaaccttggtaccacggcctcctgtcccgccagggcaaggaagtggagcaacagtcagcctgcagatttggcacatatggggcggtcaagagaagaccccgctgggatggaagcctccaccatgcccatatctgccttgccccgaacgagcagtgacccggtgttgctgaaggcccctgctcccctgggaactgttgccgacagtctcagggcctccgatgggcagcttcaagccaaggcaccaacgaagcccccccggacaccctccttcgaactgcctgatgcctctgaacgtcccccgacgtactgcgagctggtgccccgagtgcccagtgtccagggaacatccccgagccaaagctgcccagagccagaggccccatggtgggaggccgaggaggatgaggaggaagagaatagatgttttacaagaccacaggctgagatctctttctgcccccatgatgccccctcctgcctgctgggcccccagaatcggcccctggaaccccaagtcctgcataccctccgtggcctgttcctggagcaccatcctgggagcaccgcccttcacctgctattggtagactgccaggccacaggcctcctgggagtgaccagagatcagcggggcaacatgggagtctcatctggcctggagctgctcactcttccccatggacaccacttgaggttggaactgctggagaggcatcagacactggcgctggccggggcgctggcggtgctgggctgctcggggccgctggaggagcgcgcagccgcactgaggggactggtagagctggcgctggcgctgcggccaggggcggcgggggacctgcccgggctggctgcagtcatgggcgccctgctcatgccccaggttcgtggggagcagggactggaggaagctggagtgcgggtgactgggaagactggagaggaggcgtgctcagatctcttctcccaggtgtcccggttggagcacacgtggcgccagctccgaaggagccacacggaggctgcgctggcctttgagcaggagctgaagccgctgatgcgggctctggatgagggcgctggaccctgcgaccccggcgaggtggcgctgccgcacgtggcacccatggttcgcctactggagggcgaggaagtcgcggggccgctggacgagagctgtgagcggctgttgcgcaccctgcacggggcgcgtcacatggtccgggacgcacccaaattccgcaaggtggcagcccagcgcctgcgaggattccggcctaacccggagctgagggaggccctgaccaccggcttcgtgcggaggctgctctggggtagccggggcgcgggagctccgcgcgctgaacgctttgagaagttccagcgcgtcctcggcgtcctgtcgcagcgcctggagcctgaccgctgagagcgcagacacccttcttcacacccgggacccccaggtttttgcgaaccccagaagagaccaaaggagtcgtcccaggctcctcgcgcctcaggtggaatcctgccctgtgcctcacagaagaggtggggaccgcagtcagggtcacctggaccatggtgaacatgtgacctgcagatctggcatcagaggccagagttcaaatgtgactccacctcttaaaagccgtgatttctagcagttgacttcacctctgtgtcggcctttaacaaaatcatagccatacagcagctcaggcctgtaatctcagcactttgggaggccgaggcggaaggaaggcttgaggccaggagttcaagaccagccagggcaacatggtgagacctcatctctacaaaaactgaaaaataaaaaacttttaaaaaatg

SEQ ID NO: 13949 - DNA, 7152 bp, Homo sapiens
gaattcattaattacatttctgcaagatggggtggcatgttgtcatcttcagccattttttttttcttcgattgcattatatttggaacaggcacgatggtgacatctgtaatcccaactacttgggaggctgaggctagaggattccttgagcccaggaattcaaggctaaagtgtgctatgatcacacctgtgaatagcactgcactccagcctgggcaacacataagacctctctctttaaatgtaaaaaaaaaagtctgcgtgcagtggcttatgcctgtaatcccagcactttgggaggctgaggcaggtggatcacctgaggtcaggagttcaagaccagcctggcgaacacagtgaaaccctgtctctactacaaatataaaaaaagaaaaaacattagctgggtgtggtggtgcatgcctgtaatcccagctacttgggaggctgaggcaggagaatcgcttgaatctgggaggcagaggttgcagtgagccaagatcgcaccattgcactccagcctgggtgatagaatgagactctgtctcaaaaaaaaaaaaaaaaaaaaaaaaagatttgatggagctgtctccaaaattaagaagaggatgaaaggagctgacccagacactcaagcagggctaattattccccttttacagatgtggaagactgaggcctgttgaaagtgcagagctcagccctggcaccctctgttcccaagagctccatgcaggtgccacaggatggagaagaccttgctggccaaccttggtaccacggcctcctgtcccgccaggtaccacccacagcaggacctcagcaccatctggtggggagcctctcccacccttgctgaggattcctgggtccctggatgagggacttagtgccaaggtctattgggacaggtggcagagggctggggactgtcttgaaggttggctggctggggactgtcactatatttaaattatcactttctttgggatgatgagattggtgatggagcttaaggagagtcctaatgcccccaaactactcttggctctggccgtctctccctctgaactccatctacctcctggtatttccctctaaatgtgaggctcccaagccaggcatggtggctcacgcctgtaatcccaacagtttgaaaggccgaggtgggcggatcacttgaagtcaggagttcaagaccagcctggccaacattgtgaaaccccatctctaataaaaatacaaaaattagccagacatggtggtatgcgcctgtagtctcagctacttgggaggctgaggcaggagaatctcttgaacccaggaggcagaggttgtagtgagccacaattgtgccactgcactccagactgggtaacagagcgagactctgtcaaaaacataaataaataaacaaacaaataaatctgaggctcccacctccatctgaaactcagttgtcacccccaaaaattctgggaccctgagcatctcatgaaatcatgagaggcagtagaacttaatagttaaaatcccataattgagacccagacaccctaggttcaaatccaaaccctacaatttatattgtatgtgaccttgggcaggacatttgacctctctgggcctcagtctcccgatctttaacatagggatagcaggccaggcatgttggctcatgcctgtaatcccagcactttgggaggctgaggcaggaggatcacttgaggtcaggagttccaaaccagtctgggcaacatagcagaactctgtctctacacaaaaaaaaaaaaaaaagcgaaaattatccaggcatgggtggcatgtacctgttgtcccaactactcaggaggctgagatgggaggattgcttaagcccaggaggtcaaggctgtgagtgagccatgagtgctccactgcactcagcctgggcaatcgagagagaccttgactcaaaaaaaaaaaaaaaaaaaaaaggccggaagaaaaaaatgggccgggcatggtgactcatgcctgtaatcctagcactttgggaggccgaggtgggtagatcacctgaagtcaggagttcgagaccagcctgacctatatgatgaaaccccctctctactaaaaatacaaaaaagtagccaggcatggtggcatgcacctgtaatcccagctactcgggaggctgagacagcagaatcgcttgaacccaggaggcagaggttgcagtgagccgagattgtgccattgcactccagcctgagcaacaagagtgaaactccgtcccaaagaacaacaacaaaaaaaggtataataatacctaccacccttgttacaggaattacaagagttaacaccctttacatttaaagcagtgcttgacatatagtaagggctacacacgtgtgtctgctacatctattatttagtccccagaccccatgttcagctctactttgcctctctctggggtcctggcccttctacctgcctccccaagccttttttttgtttttttttttgttttttttttgtttttgagacatgatctcactctgtcacccatgctggagtgcaatggctccatctcggctcactgcaacctctgcctcctgggttcaagcgattctcccacctcagcctcctgagtagctggaatgacaggtgcacaccaccacgctcagctaatttttatattttttggtagagacagggttttgccatgttgcccaggctggtctcaaactcctgatctcaagtgatctgcctacctcagcctcccaaagtgctgggattacaggtgtgagccactgtgccccacccttcctaccctattttgacaccagccaccacagctggcataagactgcttgcaaatgtttataaaagagggggccccaatctggaagcatccagctaatggcttctcttgaagccacatttgcataacaagcacagtgcatttaccaaattagatgttgcattggtcagcatcagctagtggctgtaacaaacattcccaagatatcaccagctaaacacagtcaacatgttaatgtcatagtccaaggtggttgagaagcagagatgcaaagctccataaatcagttgggagccaagtgcatcttgtagctctgtcatccctctgggctttgggggatatcagctgacagacaggggacacaacctataagattgtgcagcagggttttatgcgccaggtctggatatttcccatagcccttctaccccacatcccattggccagttctcatcacatgacaaccctagccgcaagggaacctgggaaatgtagtctacgtaggtgccaggagaaagggggacagaacttggtgtgaaagttccccgtctttgcctgccacagaagtttcactggggtagcttttcttgggtggtgggggcaatggtggggggagctaccattaaccactgccctggactcattcctaattcccctgccccctgaacttcatccacagaaggctgaagctcttcttcagcaaaatggcgacttcctggttcgcgcctctgggtcccgtgggggcaaccccgtgatctcctgccgctggcggggctcagccctccattttgaggtgttccgtgtggccctgcgtccccggccaggccgacccacagccctctttcaactggaggatgagcaattccccagcataccggctctggttcacagttatatgacaggcaggcgcccactgtcccaggccacaggggctgtggtctccaggcctgtgacttggcaggggcctctgcgacgcagctttagcgaggacaccctgatggatggcccagctcggatagagcctctcaggtactcacagtctccctgcctccttgagaacacccaacactcgcagggttttccaactcaatggttgactttttttttttttgactgagtctcactctgttgcccaggctggagtgcagtggcatgatttcagctcactgcaacctccacctctcaggttcaagcgattctcctgcctcagcctccagagtagctgggattacaggagtgcaccaccacgcccagctaatttttttacttttttattttttatttttctctggagtcgaagtctcactctgttgcccaggctggagtgcaatggcacgatctcagcccactgcaacctccgcctcccgggttcaagcaattctcctgtctcagcttcccgagtagctgggattacaggcgtgcaccaccatgcctggctaattttttgtatttttagtagagacggggtttcaccatgttggccaggctggtctcaaactcctgacctcaagtgatccacccgcctcggcctcccaaagtgctgggattacaggcatgagccaccacgcctggctaattttttgtatttttagtagagacagggtttcaccatgttggcctggctggtcttgaacttttgacctcacgtgaccgcccgcctcagcctcccatagtgctgggattacaggtgtgagccaccgcacccggccttggttgacttttgaggcccgaacattcttagttgtgggggaggaggtggagatgtcctgtgcatcatagggtgctgagcagcattcctgagctccatccaactagatgctactagttgtgacaactaaagatgtctccacacgttgctaagagtcccctggacgtaggtcaccttgattggttgagactcactggtacagagtaactggacacagggttttgcagatattggtgggggacactgcttaggtggggactacaggtttctcccacttctgtcccccagggcaaggaagtggagcaacagtcagcctgcagatttggcacatatggggcggtcaagagaagaccccgctgggatgggtaagtgtctgctagaatggcctgtggctcagggattggctctgccactcaccacctaagagatcttggtcaggtgcaggcacctcttcgagcctcaatttcttgctttagaaaatgatgacaatcacgatgacttaaaacatgcagggactttgtgggtgcttaaaatgtgtgtttacaaggctgagcgcggtggctcatgcctgtaatcccagcactttgggaggccgaggccggtggatcacttgaggtcaggaattcgagaccagccttgccaacatggtgaaaccccatctccactaaaaacacaaaattagccgagcgtggtggcacgcacctgtaatcccagctactctggaggctgcggcaggagaatcgcttgaacctgggaggtggaggttgcagtgagccgagatggcgctaccgcactccagactgggtgacagaacaaaactccatctcaaaaaaaaaaaaaagtgtttacaattattccaaggagctgtacctgttctgaccacagcttaccttgctaacaacttctgctacgtaccctcctcatgctggtcacacagccctccttgcagttgttcgaaccctcaggcttttattcccgcctcggggcctttgcattttacatttccaccagtgacgggaacattctcattcccctaattttttcctgagtggctcctctccatccagggtaagttcctcaaagcagttgagtctgacggtcttacctaaaggaggactcacctgaatgccccctcatgccccttttttcccatccttctcccaaccccattcaacatgagccgtccctgcatcccaggccctgcacggagtgctaggatacatcaacaaaccagaaagagacaaagatccctgcccgatgggagccaacagtccacgagaggacaacaaaccatgaaccacaaaaataaggcaattttgtttgcttcaagatgaaaattaaaacacaggaagggaaggccaggcacagtggctcaggcctgtaatcccagcactttggaaggccaaggcgggcggatcacctaaagtcaggagttcgagaccagcctggccaacatggcgaaaccccgtctctactaaaactacaaaaattagccgggcgtggtggtacacacctgtaatcccagctactcgggagactcgggaggctgaggcacgagaattgcttgaacccgggaggcagaggttgccgtgagccaagattgcaccactgcactccagcctggacaacagagtgagactctgtctcaaaaaacaaacaaacaaacaaaaaacagtaagggaagggtgaggtggctcaggtctgtaatcctagcactttgggaggccaaggtgggcggatcacttgaggtcaggagttcgagaccagcctggccaacatggtgaaaacccatctctactaaaaaaaaataaaataaaataaaatacaaaaattagccaggtgtagtggcatatgcctgtaatccaagctacttgggacagagtgagactgtctcaaaaaaaccgaaaaaacaaaaacaaaacaaaacaaaaaaaacagagtaagggagatagagactataaagatggagatgtatattgcaattttattttatttctatttatttatttatttttgagatagagttttgctcttgttgcccaggatggagtgcaatggcgtgataccggctcactgcaacctccacctcctgggttcaagtgattctcctgcctcagcctcccgagtagctgggattacaggcatgtgcaccacgccctgctaattttgtatttttagtggagatggggtttccccatgttggtcaggctggtctcgaactcctgacctcaggtgatccacccacctcaacctcccaaagtgctgggattacaggcgtgagccattgtacccaagcaagcaattttaagtggtagtcaggaaaggccccattgcagaaaaaaataaaattgaaggaaatgagggagggaacaggtggataactgggggataagcaggcaggaggaagaggcagtgcaaaggctcttgggtcagaacaagaatttaagctgttcattcaaccaaaaaatgagtgggtagctgggtgtggtgttgcacgcctgtggtcctagccacttgggaggttgaagcaggaggactccttgaacccagaaagtcaaggctgcagtgagccgtgatcgcaccattgcactccagcctgggccacagagtgagaccctgactcaaattt

SEQ ID NO: 13950 - DNA, 3493 bp, Homo sapiens
gaattcattaattacatttctgcaagatggggtggcatgttgtcatcttcagccattttttttttcttcgattgcattatatttggaacaggcacgatggtgacatctgtaatcccaactacttgggaggctgaggctagaggattccttgagcccaggaattcaaggctaaagtgtgctatgatcacacctgtgaatagcactgcactccagcctgggcaacacataagacctctctctttaaatgtaaaaaaaaaagtctgcgtgcagtggcttatgcctgtaatcccagcactttgggaggctgaggcaggtggatcacctgaggtcaggagttcaagaccagcctggcgaacacagtgaaaccctgtctctactacaaatataaaaaaagaaaaaacattagctgggtgtggtggtgcatgcctgtaatcccagctacttgggaggctgaggcaggagaatcgcttgaatctgggaggcagaggttgcagtgagccaagatcgcaccattgcactccagcctgggtgatagaatgagactctgtctcaaaaaaaaaaaaaaaaaaaaaaaaagatttgatggagctgtctccaaaattaagaagaggatgaaaggagctgacccagacactcaagcagggctaattattccccttttacagatgtggaagactgaggcctgttgaaagtgcagagctcagccctggcaccctctgttcccaagagctccatgcaggtgccacaggatggagaagaccttgctggccaaccttggtaccacggcctcctgtcccgccagaaggctgaagctcttcttcagcaaaatggcgacttcctggttcgcgcctctgggtcccgtgggggcaaccccgtgatctcctgccgctggcggggctcagccctccattttgaggtgttccgtgtggccctgcgtccccggccaggccgacccacagccctctttcaactggaggatgagcaattccccagcataccggctctggttcacagttatatgacaggcaggcgcccactgtcccaggccacaggggctgtggtctccaggcctgtgacttggcaggggcctctgcgacgcagctttagcgaggacaccctgatggatggcccagctcggatagagcctctcagggcaaggaagtggagcaacagtcagcctgcagatttggcacatatggggcggtcaagagaagaccccgctgggatgggtaagtgtctgctagaatggcctgtggctcagggattggctctgccactcaccacctaagagatcttggtcaggtgcaggcacctcttcgagcctcaatttcttgctttagaaaatgatgacaatcacgatgacttaaaacatgcagggactttgtgggtgcttaaaatgtgtgtttacaaggctgagcgcggtggctcatgcctgtaatcccagcactttgggaggccgaggccggtggatcacttgaggtcaggaattcgagaccagccttgccaacatggtgaaaccccatctccactaaaaacacaaaattagccgagcgtggtggcacgcacctgtaatcccagctactctggaggctgcggcaggagaatcgcttgaacctgggaggtggaggttgcagtgagccgagatggcgctaccgcactccagactgggtgacagaacaaaactccatctcaaaaaaaaaaaaaagtgtttacaattattccaaggagctgtacctgttctgaccacagcttaccttgctaacaacttctgctacgtaccctcctcatgctggtcacacagccctccttgcagttgttcgaaccctcaggcttttattcccgcctcggggcctttgcattttacatttccaccagtgacgggaacattctcattcccctaattttttcctgagtggctcctctccatccagggtaagttcctcaaagcagttgagtctgacggtcttacctaaaggaggactcacctgaatgccccctcatgccccttttttcccatccttctcccaaccccattcaacatgagccgtccctgcatcccaggccctgcacggagtgctaggatacatcaacaaaccagaaagagacaaagatccctgcccgatgggagccaacagtccacgagaggacaacaaaccatgaaccacaaaaataaggcaattttgtttgcttcaagatgaaaattaaaacacaggaagggaaggccaggcacagtggctcaggcctgtaatcccagcactttggaaggccaaggcgggcggatcacctaaagtcaggagttcgagaccagcctggccaacatggcgaaaccccgtctctactaaaactacaaaaattagccgggcgtggtggtacacacctgtaatcccagctactcgggagactcgggaggctgaggcacgagaattgcttgaacccgggaggcagaggttgccgtgagccaagattgcaccactgcactccagcctggacaacagagtgagactctgtctcaaaaaacaaacaaacaaacaaaaaacagtaagggaagggtgaggtggctcaggtctgtaatcctagcactttgggaggccaaggtgggcggatcacttgaggtcaggagttcgagaccagcctggccaacatggtgaaaacccatctctactaaaaaaaaataaaataaaataaaatacaaaaattagccaggtgtagtggcatatgcctgtaatccaagctacttgggacagagtgagactgtctcaaaaaaaccgaaaaaacaaaaacaaaacaaaacaaaaaaaacagagtaagggagatagagactataaagatggagatgtatattgcaattttattttatttctatttatttatttatttttgagatagagttttgctcttgttgcccaggatggagtgcaatggcgtgataccggctcactgcaacctccacctcctgggttcaagtgattctcctgcctcagcctcccgagtagctgggattacaggcatgtgcaccacgccctgctaattttgtatttttagtggagatggggtttccccatgttggtcaggctggtctcgaactcctgacctcaggtgatccacccacctcaacctcccaaagtgctgggattacaggcgtgagccattgtacccaagcaagcaattttaagtggtagtcaggaaaggccccattgcagaaaaaaataaaattgaaggaaatgagggagggaacaggtggataactgggggataagcaggcaggaggaagaggcagtgcaaaggctcttgggtcagaacaagaatttaagctgttcattcaaccaaaaaatgagtgggtagctgggtgtggtgttgcacgcctgtggtcctagccacttgggaggttgaagcaggaggactccttgaacccagaaagtcaaggctgcagtgagccgtgatcgcaccattgcactccagcctgggccacagagtgagaccctgactcaaattt

SEQ ID NO: 13951 - DNA, 13853 bp, Homo sapiens
agcttccgcctggacccagcctcgtgggagccccgcgggtcctgcccaggtgagtggagccccagggcagatccagaaccaggattattgggatggggagtcctctctttccaggtggggtcaccggctcgcagggaggatctggggtagaagaggtcgcctcgcgaatgagagggtcgctgtgcgttacgcgtgtcggtgtgctcgggctcacctgggcgtgcctctctaagtgtatttcctgtgcagcacagaaagccattgtttccatttttgcctgagtgatcctcttaaacggcgaatcagatcgggcccctccttcacttaaaacccttgggtcatagagattaaaattcaaagtccactagtttttgcctagtctctcctcctgatctctccaacctcattgccctcctatctactccttcctcatcgtattccggctacaccagccgccttgatgatgtaaaatgtaaaaagcaagtccatctcagctccaggcctttacccttactgtacccctcacccaggcgactcctccaaatctttgcctaactgcctccttctgtactgaggtctcagttccaatgtcactttataggagaggctgtcctgtccagcctcctctatcacatctccctggcttatcactttcattgataactcttagaaatggtctgtcttctccattcatcttgtgctcgtttgcagtctgtcttgcgcagccgactgcaagctctggagggcagggtggtgccgagctttaatctccttagtcactgtatctctaggtcctagaacagagcctggtgcacagcaagtgctccagcaatggtcgtccaacgtcaaaagcgagtcctgcctacatctgtgtttgtgttgcctgtgctggtggttcccaccctccacgtcctccccacacgtggacacatgtttatgatccaactggaacatgaataatcccctctctcctctctctatgcttggtctgattcctgattctgcccgtttcttctcttccgtgcccgaataaatgatcccaaaggactcagaggcaggagatggcttagttggcctttggctgacctatggccaccctgtgtcctcaaactaaccagaaccttgccattgactcaacttcactctcactaagggagacacaagacaggaacttggggttgggaaactctgcgaccgaggctagccctggtccaggtgacaaacaggaagtgcgcaggcattgcaaagacacacctggcttcaggtatgcggcactggcagctggctccctgcccagcgctcctcccctaaagccacctagggctggtctgggaacttcctgctgactcaggaggcaggaatttctctgcagaccccaccagaagactttgcagggctgcagggagagcttgcaggagagtaagaagcagattatcttcttctggaccatccagagaaatctcccccaccagacacctgagacacactggccctgaggcctgtgagattatcgggaaactaccaaaatgtctgagatccaaattcaatcatcatgataaccacatgtatgggctccgaaatagaaggatctgcaaaggcaacattgctgtttgctgacattgctacaaaatgtgaccttttaaaaatcttaaccctggggttacattcttttttttttttttttttttgagacggagtcttgctctgtcacccaggctggagtgcagtggtgtgatctcggttcactgcagggtctgcctcctggattcaagcgattctctctcctcagcctcctgagtagctgggactacaggcacacgccaccatgcctggctaatttttgtatttttagtagagacggggtttcactgtgttgaccaggctggtctcaaactcctgacctcagatgatccacccacctctgcctcccaaagtgctaggattacaagagtgagccaccgcgcctggcccccagcgttgcattctaaagcaaagaataggggttagatctgcacctatcctgagaacctctgagtgtgcgcataggttgccgagaagccatggatgtttgtaagttaaattccccctgactgggatgttttttcacccagagtcacctggcacactccccagaattccttccagactttactcaatgagacctttcctggtcacatgatcaaaaatgttcacccagcctgggcaacgtggcaagacccaatctctacatatatatttaaaaattagccaggcacagccagacgcagtggctcatgctggtaatcccagtgctttgggaggctgaggagggtggatcacctgaggtcaggagttcgagaccagcctggccaacatggagaaaccccatctctattaaaaatattttaaaaattagccaggcatggtggcacacacctgtagtcccagctactgaggaggccgatgcacgagaattgcttgaaaccagcaggcggaagttgcaatgaactgagatcatgccactgcactccagcctgggcaacagagtgagacttgatctcaaaaaaaaaaaaaaaaaaaaaaattagccaggtacagtggcccacgctcatagtcccagctactcagaaggatgaggtgggagaatcacttgagcccaggaggtcaaggccgcaatgagctgtgattgcaccactgcagtccagcctgggcaataaagcaagactctgtctcaaaaaaaaaagagtgttcaccctagcacctgtactttcattatatcccatccatggtttagtttttttgtctagcactcactcatgtatgccatcatctagttcttttctgaggtgctgctccccagtagaatgtcagctcccaaggacagagatttccatctgttttgttcaatgctatgtctctagggcctagaacagagcctgggaccccataaggtgctgaataaataggggttcagtgaattcattaattacatttctgcaagatggggtggcatgttgtcatcttcagccattttttttttcttcgattgcattatatttggaacaggcacgatggtgacatctgtaatcccaactacttgggaggctgaggctagaggattccttgagcccaggaattcaaggctaaagtgtgctatgatcacacctgtgaatagcactgcactccagcctgggcaacacataagacctctctctttaaatgtaaaaaaaaaagtctgcgtgcagtggcttatgcctgtaatcccagcactttgggaggctgaggcaggtggatcacctgaggtcaggagttcaagaccagcctggcgaacacagtgaaaccctgtctctactacaaatataaaaaaagaaaaaacattagctgggtgtggtggtgcatgcctgtaatcccagctacttgggaggctgaggcaggagaatcgcttgaatctgggaggcagaggttgcagtgagccaagatcgcaccattgcactccagcctgggtgatagaatgagactctgtctcaaaaaaaaaaaaaaaaaaaaaaaaagatttgatggagctgtctccaaaattaagaagaggatgaaaggagctgacccagacactcaagcagggctaattattccccttttacagatgtggaagactgaggcctgttgaaagtgcagagctcagccctggcaccctctgttcccaagagctccatgcaggtgccacaggatggagaagaccttgctggccaaccttggtaccacggcctcctgtcccgccaggtaccacccacagcaggacctcagcaccatctggtggggagcctctcccacccttgctgaggattcctgggtccctggatgagggacttagtgccaaggtctattgggacaggtggcagagggctggggactgtcttgaaggttggctggctggggactgtcactatatttaaattatcactttctttgggatgatgagattggtgatggagcttaaggagagtcctaatgcccccaaactactcttggctctggccgtctctccctctgaactccatctacctcctggtatttccctctaaatgtgaggctcccaagccaggcatggtggctcacgcctgtaatcccaacagtttgaaaggccgaggtgggcggatcacttgaagtcaggagttcaagaccagcctggccaacattgtgaaaccccatctctaataaaaatacaaaaattagccagacatggtggtatgcgcctgtagtctcagctacttgggaggctgaggcaggagaatctcttgaacccaggaggcagaggttgtagtgagccacaattgtgccactgcactccagactgggtaacagagcgagactctgtcaaaaacataaataaataaacaaacaaataaatctgaggctcccacctccatctgaaactcagttgtcacccccaaaaattctgggaccctgagcatctcatgaaatcatgagaggcagtagaacttaatagttaaaatcccataattgagacccagacaccctaggttcaaatccaaaccctacaatttatattgtatgtgaccttgggcaggacatttgacctctctgggcctcagtctcccgatctttaacatagggatagcaggccaggcatgttggctcatgcctgtaatcccagcactttgggaggctgaggcaggaggatcacttgaggtcaggagttccaaaccagtctgggcaacatagcagaactctgtctctacacaaaaaaaaaaaaaaaagcgaaaattatccaggcatgggtggcatgtacctgttgtcccaactactcaggaggctgagatgggaggattgcttaagcccaggaggtcaaggctgtgagtgagccatgagtgctccactgcactcagcctgggcaatcgagagagaccttgactcaaaaaaaaaaaaaaaaaaaaaaggccggaagaaaaaaatgggccgggcatggtgactcatgcctgtaatcctagcactttgggaggccgaggtgggtagatcacctgaagtcaggagttcgagaccagcctgacctatatgatgaaaccccctctctactaaaaatacaaaaaagtagccaggcatggtggcatgcacctgtaatcccagctactcgggaggctgagacagcagaatcgcttgaacccaggaggcagaggttgcagtgagccgagattgtgccattgcactccagcctgagcaacaagagtgaaactccgtcccaaagaacaacaacaaaaaaaggtataataatacctaccacccttgttacaggaattacaagagttaacaccctttacatttaaagcagtgcttgacatatagtaagggctacacacgtgtgtctgctacatctattatttagtccccagaccccatgttcagctctactttgcctctctctggggtcctggcccttctacctgcctccccaagccttttttttgtttttttttttgttttttttttgtttttgagacatgatctcactctgtcacccatgctggagtgcaatggctccatctcggctcactgcaacctctgcctcctgggttcaagcgattctcccacctcagcctcctgagtagctggaatgacaggtgcacaccaccacgctcagctaatttttatattttttggtagagacagggttttgccatgttgcccaggctggtctcaaactcctgatctcaagtgatctgcctacctcagcctcccaaagtgctgggattacaggtgtgagccactgtgccccacccttcctaccctattttgacaccagccaccacagctggcataagactgcttgcaaatgtttataaaagagggggccccaatctggaagcatccagctaatggcttctcttgaagccacatttgcataacaagcacagtgcatttaccaaattagatgttgcattggtcagcatcagctagtggctgtaacaaacattcccaagatatcaccagctaaacacagtcaacatgttaatgtcatagtccaaggtggttgagaagcagagatgcaaagctccataaatcagttgggagccaagtgcatcttgtagctctgtcatccctctgggctttgggggatatcagctgacagacaggggacacaacctataagattgtgcagcagggttttatgcgccaggtctggatatttcccatagcccttctaccccacatcccattggccagttctcatcacatgacaaccctagccgcaagggaacctgggaaatgtagtctacgtaggtgccaggagaaagggggacagaacttggtgtgaaagttccccgtctttgcctgccacagaagtttcactggggtagcttttcttgggtggtgggggcaatggtggggggagctaccattaaccactgccctggactcattcctaattcccctgccccctgaacttcatccacagaaggctgaagctcttcttcagcaaaatggcgacttcctggttcgcgcctctgggtcccgtgggggcaaccccgtgatctcctgccgctggcggggctcagccctccattttgaggtgttccgtgtggccctgcgtccccggccaggccgacccacagccctctttcaactggaggatgagcaattccccagcataccggctctggttcacagttatatgacaggcaggcgcccactgtcccaggccacaggggctgtggtctccaggcctgtgacttggcaggggcctctgcgacgcagctttagcgaggacaccctgatggatggcccagctcggatagagcctctcaggtactcacagtctccctgcctccttgagaacacccaacactcgcagggttttccaactcaatggttgactttttttttttttgactgagtctcactctgttgcccaggctggagtgcagtggcatgatttcagctcactgcaacctccacctctcaggttcaagcgattctcctgcctcagcctccagagtagctgggattacaggagtgcaccaccacgcccagctaatttttttacttttttattttttatttttctctggagtcgaagtctcactctgttgcccaggctggagtgcaatggcacgatctcagcccactgcaacctccgcctcccgggttcaagcaattctcctgtctcagcttcccgagtagctgggattacaggcgtgcaccaccatgcctggctaattttttgtatttttagtagagacggggtttcaccatgttggccaggctggtctcaaactcctgacctcaagtgatccacccgcctcggcctcccaaagtgctgggattacaggcatgagccaccacgcctggctaattttttgtatttttagtagagacagggtttcaccatgttggcctggctggtcttgaacttttgacctcacgtgaccgcccgcctcagcctcccatagtgctgggattacaggtgtgagccaccgcacccggccttggttgacttttgaggcccgaacattcttagttgtgggggaggaggtggagatgtcctgtgcatcatagggtgctgagcagcattcctgagctccatccaactagatgctactagttgtgacaactaaagatgtctccacacgttgctaagagtcccctggacgtaggtcaccttgattggttgagactcactggtacagagtaactggacacagggttttgcagatattggtgggggacactgcttaggtggggactacaggtttctcccacttctgtcccccagggcaaggaagtggagcaacagtcagcctgcagatttggcacatatggggcggtcaagagaagaccccgctgggatgggtaagtgtctgctagaatggcctgtggctcagggattggctctgccactcaccacctaagagatcttggtcaggtgcaggcacctcttcgagcctcaatttcttgctttagaaaatgatgacaatcacgatgacttaaaacatgcagggactttgtgggtgcttaaaatgtgtgtttacaaggctgagcgcggtggctcatgcctgtaatcccagcactttgggaggccgaggccggtggatcacttgaggtcaggaattcgagaccagccttgccaacatggtgaaaccccatctccactaaaaacacaaaattagccgagcgtggtggcacgcacctgtaatcccagctactctggaggctgcggcaggagaatcgcttgaacctgggaggtggaggttgcagtgagccgagatggcgctaccgcactccagactgggtgacagaacaaaactccatctcaaaaaaaaaaaaaagtgtttacaattattccaaggagctgtacctgttctgaccacagcttaccttgctaacaacttctgctacgtaccctcctcatgctggtcacacagccctccttgcagttgttcgaaccctcaggcttttattcccgcctcggggcctttgcattttacatttccaccagtgacgggaacattctcattcccctaattttttcctgagtggctcctctccatccagggtaagttcctcaaagcagttgagtctgacggtcttacctaaaggaggactcacctgaatgccccctcatgccccttttttcccatccttctcccaaccccattcaacatgagccgtccctgcatcccaggccctgcacggagtgctaggatacatcaacaaaccagaaagagacaaagatccctgcccgatgggagccaacagtccacgagaggacaacaaaccatgaaccacaaaaataaggcaattttgtttgcttcaagatgaaaattaaaacacaggaagggaaggccaggcacagtggctcaggcctgtaatcccagcactttggaaggccaaggcgggcggatcacctaaagtcaggagttcgagaccagcctggccaacatggcgaaaccccgtctctactaaaactacaaaaattagccgggcgtggtggtacacacctgtaatcccagctactcgggagactcgggaggctgaggcacgagaattgcttgaacccgggaggcagaggttgccgtgagccaagattgcaccactgcactccagcctggacaacagagtgagactctgtctcaaaaaacaaacaaacaaacaaaaaacagtaagggaagggtgaggtggctcaggtctgtaatcctagcactttgggaggccaaggtgggcggatcacttgaggtcaggagttcgagaccagcctggccaacatggtgaaaacccatctctactaaaaaaaaataaaataaaataaaatacaaaaattagccaggtgtagtggcatatgcctgtaatccaagctacttgggacagagtgagactgtctcaaaaaaaccgaaaaaacaaaaacaaaacaaaacaaaaaaaacagagtaagggagatagagactataaagatggagatgtatattgcaattttattttatttctatttatttatttatttttgagatagagttttgctcttgttgcccaggatggagtgcaatggcgtgataccggctcactgcaacctccacctcctgggttcaagtgattctcctgcctcagcctcccgagtagctgggattacaggcatgtgcaccacgccctgctaattttgtatttttagtggagatggggtttccccatgttggtcaggctggtctcgaactcctgacctcaggtgatccacccacctcaacctcccaaagtgctgggattacaggcgtgagccattgtacccaagcaagcaattttaagtggtagtcaggaaaggccccattgcagaaaaaaataaaattgaaggaaatgagggagggaacaggtggataactgggggataagcaggcaggaggaagaggcagtgcaaaggctcttgggtcagaacaagaatttaagctgttcattcaaccaaaaaatgagtgggtagctgggtgtggtgttgcacgcctgtggtcctagccacttgggaggttgaagcaggaggactccttgaacccagaaagtcaaggctgcagtgagccgtgatcgcaccattgcactccagcctgggccacagagtgagaccctgactcaaatttaaaaaaaaaaaaaaaaagaagaagaaaagaaagggctgggtgcaatggctcaatttcttcttaaaaaaaaaaaaaaaaagatacacgtgcagaatgtgcaggttgagcctattcaaaggcatggtaaatacagtctcccaaaagtcttagtacagttttaagtactaatagtccagaaattacaagcctgtaatcccagcactttgggaggccaaagcgggcggatcacgaggtcaagagatcaagaccatcctggccaacatggtgaaaccccgtgtctactaaaaatacaaaaattagctgggtgtggtggcgcctgtggtcccagctactcgggaggctgaagcaggagaatcacttgaacccgggaggcagaggttgcaataagccgagatggcgccactgcactgtagcctggtgacagagtgagactccgtcaagaaagaaaagaaaggaaggaaggaaggaacgaagggagggagggaaggagggacacacgagtgtagctgaagcagagggaatgaggggagagtcagagagagagaccctggggctcagattgtgaggatttttcagctactgtgagcactttggaccttaactcagagtgagccaggcactgttggatgatttcaagttcctagaaaagagcctattcaaaggcatggtaaatacagtctcccaaaagtcttagtacagttttaagtactaatagtccaggagatcaacatgccaccaacttacaaaggacgtcatttgaaagtttacgatgaggggagggaacttagaggaggggtcagtaggtgcagcaaaccaccatggcacacagatactgaacctgcacattctgcacatgtatctttttttttaagaagaaataaaaaagaaaaaaaagaaaagaaagtttaataagcttggtttctttgacacttatctgagtgtcataccatacgcagctttgtgaattttttatactttgtctctctatagatatctatattaattgtatatattttatatagatatgtctatggagagatatattatcacaaaaaaagtaaaatatctatcatatataaatgtaattatatgtagtatatagggcaacattatacatttaataatgttaattttatttaacatatacttaatttaaatatatattatatatttatataatatatatctatctctatagatatgatatagagagatatatcacttaattgtagatagatagatatcttttttttttttttgagacagggtcttactctgtcatccaagctggagtgcagtggtgcagtcatacctcactgcagcctctggctcaagtgatcctcccacctctgcctcccaagtagctgggaccacaggtgcatgccaccatgcccagctaattttctaactttttgtagaaacaagatcttgttatgttgcccaggctggtctggaatccctagcctcaagcaatcctctcaccttggcctcccaaaatgctgagattacaggcgtcggccaccacgctcatcctttttttaaaaaaatttttaatttcgttgggtcactgcttaccatctttcagtcagaggggcaaaaacaaagaattcaaatttaaaatgtagtattcagaattcatagggtcaggcaaggtggctcatgcctgtgatcccagcagtttgggaggccgaggagggaggattgcttgagactaggaattccagaccagcctgggcaacacagtgagatcccatctctataaaataaaataaaattaaaaaaaaataatttacagaactatagagatgctaaagttttctaaccatgtgtaagcatgtagcatttctaccgtcgaggtggttgaaattcaaaactgcacccggataggttgttataccccattattggaatgagtggatggatcaggtgggtggtagccgatgaagctctcacccccgcccattcagcaatcttccctgtgtattcccattgacccctcttgtatgacctctagaagcctccaccatgcccatatctgccttgccccgaacgagcagtgacccggtgttgctgaaggcccctgctcccctgggaactgttgccgacagtctcagggcctccgatgggcagcttcaagccaaggcaccaacgaagcccccccggacaccctccttcgaactgcctgatgcctctgaacgtcccccgacgtactgcgagctggtgccccgagtgcccagtgtccagggaacatccccgagccaaagctgcccagagccagaggccccatggtgggaggccgaggaggatgaggaggaagagaatagatgttttacaagaccacaggctgagatctctttctgcccccatgatgccccctcctgcctgctgggcccccagaatcggcccctggaaccccaagtcctgcataccctccgtggcctgttcctggagcaccatcctgggagcaccgcccttcacctgctattggtagactgccaggtgggtcacctcctgggatgctcctccccaggcccagggcaagacccaaccatgcctacataatcacgcttcacctgacttccccattcccttctgcaggccacaggcctcctgggagtgaccagagatcagcggggcaacatgggagtctcatctggcctggagctgctcactcttccccatggacaccacttgaggttggaactgctggagaggtgagccagcagcttgtaatcttggttgggggaggccaattccccccacttcccaagatctccaaacagctccccactcatggttccccagggaagaagggagatggggcaatgccacctcctgtcccccctcacccctgcattacaaacctccccacttcccccagacccttgccctccacctctgcaggcatcagacactggcgctggccggggcgctggcggtgctgggctgctcggggccgctggaggagcgcgcagccgcactgaggggactggtagagctggcgctggcgctgcggccaggggcggcgggggacctgcccgggctggctgcagtcatgggcgccctgctcatgccccaggttcgtggggagcagggactggaggaagctggagtgcgggtgactgggaagactggagaggaggcgtgctcagatctcttctcccaggtgtcccggttggagcacacgtggcgccagctccgaaggagccacacggaggctgcgctggcctttgagcaggagctgaagccgctgatgcgggctctggatgagggcgctggtaagtgaaggtctggggcttagcatcccctgggggcccagaccaaatttaacaggactcaatctagtcctatgcccagtccctgcatctgttctaggcccggtcccttcaccataggccccgccctccacatgagggttggtcctggccctttccctaggccccgccctccacacgagacttgttcctaggccacgcccccaccagccttggtcccagcccctttccctaggctacgccccttcgccataggccccgccctccatacggggcgtgtggtcctggcccctctccacagaccccgctgtcgctcagtcctaagccccgcccctgcatttgtcctaggttccacctctgccctatgccccatctacagccccaaaccctgatcagaccctccccctccgcaggaccctgcgaccccggcgaggtggcgctgccgcacgtggcacccatggttcgcctactg

SEQ ID NO: 13952 - DNA, 1750 bp, Homo sapiens
agcttccgcctggacccagcctcgtgggagccccgcgggtcctgcccagatgtggaagactgaggcctgttgaaagtgcagagctcagccctggcaccctctgttcccaagagctccatgcaggtgccacaggatggagaagaccttgctggccaaccttggtaccacggcctcctgtcccgccagaaggctgaagctcttcttcagcaaaatggcgacttcctggttcgcgcctctgggtcccgtgggggcaaccccgtgatctcctgccgctggcggggctcagccctccattttgaggtgttccgtgtggccctgcgtccccggccaggccgacccacagccctctttcaactggaggatgagcaattccccagcataccggctctggttcacagttatatgacaggcaggcgcccactgtcccaggccacaggggctgtggtctccaggcctgtgacttggcaggggcctctgcgacgcagctttagcgaggacaccctgatggatggcccagctcggatagagcctctcagggcaaggaagtggagcaacagtcagcctgcagatttggcacatatggggcggtcaagagaagaccccgctgggatggaagcctccaccatgcccatatctgccttgccccgaacgagcagtgacccggtgttgctgaaggcccctgctcccctgggaactgttgccgacagtctcagggcctccgatgggcagcttcaagccaaggcaccaacgaagcccccccggacaccctccttcgaactgcctgatgcctctgaacgtcccccgacgtactgcgagctggtgccccgagtgcccagtgtccagggaacatccccgagccaaagctgcccagagccagaggccccatggtgggaggccgaggaggatgaggaggaagagaatagatgttttacaagaccacaggctgagatctctttctgcccccatgatgccccctcctgcctgctgggcccccagaatcggcccctggaaccccaagtcctgcataccctccgtggcctgttcctggagcaccatcctgggagcaccgcccttcacctgctattggtagactgccaggccacaggcctcctgggagtgaccagagatcagcggggcaacatgggagtctcatctggcctggagctgctcactcttccccatggacaccacttgaggttggaactgctggagaggtgagccagcagcttgtaatcttggttgggggaggccaattccccccacttcccaagatctccaaacagctccccactcatggttccccagggaagaagggagatggggcaatgccacctcctgtcccccctcacccctgcattacaaacctccccacttcccccagacccttgccctccacctctgcaggcatcagacactggcgctggccggggcgctggcggtgctgggctgctcggggccgctggaggagcgcgcagccgcactgaggggactggtagagctggcgctggcgctgcggccaggggcggcgggggacctgcccgggctggctgcagtcatgggcgccctgctcatgccccaggtgtcccggttggagcacacgtggcgccagctccgaaggagccacacggaggctgcgctggcctttgagcaggagctgaagccgctgatgcgggctctggatgagggcgctggaccctgcgaccccggcgaggtggcgctgccgcacgtggcacccatggttcgcctactg

SEQ ID NO: 13953 - DNA, 3082 bp, Homo sapiens
ctgggaactgttgccgacagtctcagggcctccgatgggcagcttcaagccaaggcaccaacgaagcccccccggacaccctccttcgaactgcctgatgcctctgaacgtcccccgacgtactgcgagctggtgccccgagtgcccagtgtccagggaacatccccgagccaaagctgcccagagccagaggccccatggtgggaggccgaggaggatgaggaggaagagaatagatgttttacaagaccacaggctgagatctctttctgcccccatgatgccccctcctgcctgctgggcccccagaatcggcccctggaaccccaagtcctgcataccctccgtggcctgttcctggagcaccatcctgggagcaccgcccttcacctgctattggtagactgccaggtgggtcacctcctgggatgctcctccccaggcccagggcaagacccaaccatgcctacataatcacgcttcacctgacttccccattcccttctgcaggccacaggcctcctgggagtgaccagagatcagcggggcaacatgggagtctcatctggcctggagctgctcactcttccccatggacaccacttgaggttggaactgctggagaggtgagccagcagcttgtaatcttggttgggggaggccaattccccccacttcccaagatctccaaacagctccccactcatggttccccagggaagaagggagatggggcaatgccacctcctgtcccccctcacccctgcattacaaacctccccacttcccccagacccttgccctccacctctgcaggcatcagacactggcgctggccggggcgctggcggtgctgggctgctcggggccgctggaggagcgcgcagccgcactgaggggactggtagagctggcgctggcgctgcggccaggggcggcgggggacctgcccgggctggctgcagtcatgggcgccctgctcatgccccaggttcgtggggagcagggactggaggaagctggagtgcgggtgactgggaagactggagaggaggcgtgctcagatctcttctcccaggtgtcccggttggagcacacgtggcgccagctccgaaggagccacacggaggctgcgctggcctttgagcaggagctgaagccgctgatgcgggctctggatgagggcgctggtaagtgaaggtctggggcttagcatcccctgggggcccagaccaaatttaacaggactcaatctagtcctatgcccagtccctgcatctgttctaggcccggtcccttcaccataggccccgccctccacatgagggttggtcctggccctttccctaggccccgccctccacacgagacttgttcctaggccacgcccccaccagccttggtcccagcccctttccctaggctacgccccttcgccataggccccgccctccatacggggcgtgtggtcctggcccctctccacagaccccgctgtcgctcagtcctaagccccgcccctgcatttgtcctaggttccacctctgccctatgccccatctacagccccaaaccctgatcagaccctccccctccgcaggaccctgcgaccccggcgaggtggcgctgccgcacgtggcacccatggttcgcctactggagggcgaggaagtcgcggggccgctggacgagagctgtgagcggctgttgcgcaccctgcacggggcgcgtcacatggtccgggacgcacccaaattccgcaaggtggcagcccagcgcctgcgaggtgagcgttccctctgcgctggactgcagacttcagagcaccctgcaggttctaaccggatcccccaaacccagcctgtcccaggaggggagcctctcgccacgcctcccggagccccacccaaactgggacggctccactccaggaaggttctcaccccaagcaaacgctgcatccagcggtattgataggaacagggccgtccacctcaaaacgggctgtcctgcccccagagccacctccgcgggtccccactcccccttcccacctaagacgatcccgtcccccagggatctcgatccccaagaacgccctgctccctccaaaacgactcctccgtcctatcctagggcagcccacccggcaagatccccccaccttccccgacaacctgggatcccgtcctcggggcagccccacgtccaggcacagcccctaaggcgggacctccaggatctggcacctggaacaggccaccccattgcactgcggtagagcccctcaggcaccccacccccattcctgcagagagctggaagccccctcccctctgaccccgcctagtcatcccgcaggtggggcaggtccctcccgggcccctgttgggtcaaagtcctctggggaaaggaaggtgccgggaggttgggaggggcgaggcgggcgcctgggccccgcccccagcccacctgaccttgcttccaggattccggcctaacccggagctgagggaggccctgaccaccggcttcgtgcggaggctgctctggggtagccggggcgcgggagctccgcgcgctgaacgctttgagaagttccagcgcgtcctcggcgtcctgtcgcagcgcctggagcctgaccgctgagagcgcagacacccttcttcacacccgggacccccaggtttttgcgaaccccagaagagaccaaaggagtcgtcccaggctcctcgcgcctcaggtggaatcctgccctgtgcctcacagaagaggtggggaccgcagtcagggtcacctggaccatggtgaacatgtgacctgcagatctggcatcagaggccagagttcaaatgtgactccacctcttaaaagccgtgatttctagcagttgacttcacctctgtgtcggcctttaacaaaatcatagccatacagcagctcaggcctgtaatctcagcactttgggaggccgaggcggaaggaaggcttgaggccaggagttcaagaccagccagggcaacatggtgagacctcatctctacaaaaactgaaaaataaaaaacttttaaaaaatgtaaaa

SEQ ID NO: 13954 - DNA, 512 bp, Homo sapiens
ctgggaactgttgccgacagtctcagggcctccgatgggcagcttcaagccaaggcaccaacgaagcccccccggacaccctccttcgaactgcctgatgcctctgaacgtcccccgacgtactgcgagctggtgccccgagtgcccagtgtccagggaacatccccgagccaaagctgcccagagccagaggccccatggtgggaggccgaggaggatgaggaggaagagaatagatgttttacaagaccacaggctgagatctctttctgcccccatgatgccccctcctgcctgctgggcccccagaatcggcccctggaaccccaagtcctgcataccctccgtggcctgttcctggagcaccatcctgggagcaccgcccttcacctgctattggtagactgccaggccacaggcctcctgggagtgaccagagatcaccagggcaacatggtgagacctcatctctacaaaaactgaaaaataaaaaacttttaaaaaatgtaaaa

SEQ ID NO: 13955 - DNA, 12520 bp, Homo sapiens
tggacccagcctcgtgggagccccgcgggtcctgcccaggtgagtggagccccagggcagatccagaaccaggattattgggatggggagtcctctctttccaggtggggtcaccggctcgcagggaggatctggggtagaagaggtcgcctcgcgaatgagagggtcgctgtgcgttacgcgtgtcggtgtgctcgggctcacctgggcgtgcctctctaagtgtatttcctgtgcagcacagaaagccattgtttccatttttgcctgagtgatcctcttaaacggcgaatcagatcgggcccctccttcacttaaaacccttgggtcatagagattaaaattcaaagtccactagtttttgcctagtctctcctcctgatctctccaacctcattgccctcctatctactccttcctcatcgtattccggctacaccagccgccttgatgatgtaaaatgtaaaaagcaagtccatctcagctccaggcctttacccttactgtacccctcacccaggcgactcctccaaatctttgcctaactgcctccttctgtactgaggtctcagttccaatgtcactttataggagaggctgtcctgtccagcctcctctatcacatctccctggcttatcactttcattgataactcttagaaatggtctgtcttctccattcatcttgtgctcgtttgcagtctgtcttgcgcagccgactgcaagctctggagggcagggtggtgccgagctttaatctccttagtcactgtatctctaggtcctagaacagagcctggtgcacagcaagtgctccagcaatggtcgtccaacgtcaaaagcgagtcctgcctacatctgtgtttgtgttgcctgtgctggtggttcccaccctccacgtcctccccacacgtggacacatgtttatgatccaactggaacatgaataatcccctctctcctctctctatgcttggtctgattcctgattctgcccgtttcttctcttccgtgcccgaataaatgatcccaaaggactcagaggcaggagatggcttagttggcctttggctgacctatggccaccctgtgtcctcaaactaaccagaaccttgccattgactcaacttcactctcactaagggagacacaagacaggaacttggggttgggaaactctgcgaccgaggctagccctggtccaggtgacaaacaggaagtgcgcaggcattgcaaagacacacctggcttcaggtatgcggcactggcagctggctccctgcccagcgctcctcccctaaagccacctagggctggtctgggaacttcctgctgactcaggaggcaggaatttctctgcagaccccaccagaagactttgcagggctgcagggagagcttgcaggagagtaagaagcagattatcttcttctggaccatccagagaaatctcccccaccagacacctgagacacactggccctgaggcctgtgagattatcgggaaactaccaaaatgtctgagatccaaattcaatcatcatgataaccacatgtatgggctccgaaatagaaggatctgcaaaggcaacattgctgtttgctgacattgctacaaaatgtgaccttttaaaaatcttaaccctggggttacattcttttttttttttttttttttgagacggagtcttgctctgtcacccaggctggagtgcagtggtgtgatctcggttcactgcagggtctgcctcctggattcaagcgattctctctcctcagcctcctgagtagctgggactacaggcacacgccaccatgcctggctaatttttgtatttttagtagagacggggtttcactgtgttgaccaggctggtctcaaactcctgacctcagatgatccacccacctctgcctcccaaagtgctaggattacaagagtgagccaccgcgcctggcccccagcgttgcattctaaagcaaagaataggggttagatctgcacctatcctgagaacctctgagtgtgcgcataggttgccgagaagccatggatgtttgtaagttaaattccccctgactgggatgttttttcacccagagtcacctggcacactccccagaattccttccagactttactcaatgagacctttcctggtcacatgatcaaaaatgttcacccagcctgggcaacgtggcaagacccaatctctacatatatatttaaaaattagccaggcacagccagacgcagtggctcatgctggtaatcccagtgctttgggaggctgaggagggtggatcacctgaggtcaggagttcgagaccagcctggccaacatggagaaaccccatctctattaaaaatattttaaaaattagccaggcatggtggcacacacctgtagtcccagctactgaggaggccgatgcacgagaattgcttgaaaccagcaggcggaagttgcaatgaactgagatcatgccactgcactccagcctgggcaacagagtgagacttgatctcaaaaaaaaaaaaaaaaaaaaaaattagccaggtacagtggcccacgctcatagtcccagctactcagaaggatgaggtgggagaatcacttgagcccaggaggtcaaggccgcaatgagctgtgattgcaccactgcagtccagcctgggcaataaagcaagactctgtctcaaaaaaaaaagagtgttcaccctagcacctgtactttcattatatcccatccatggtttagtttttttgtctagcactcactcatgtatgccatcatctagttcttttctgaggtgctgctccccagtagaatgtcagctcccaaggacagagatttccatctgttttgttcaatgctatgtctctagggcctagaacagagcctgggaccccataaggtgctgaataaataggggttcagtgaattcattaattacatttctgcaagatggggtggcatgttgtcatcttcagccattttttttttcttcgattgcattatatttggaacaggcacgatggtgacatctgtaatcccaactacttgggaggctgaggctagaggattccttgagcccaggaattcaaggctaaagtgtgctatgatcacacctgtgaatagcactgcactccagcctgggcaacacataagacctctctctttaaatgtaaaaaaaaaagtctgcgtgcagtggcttatgcctgtaatcccagcactttgggaggctgaggcaggtggatcacctgaggtcaggagttcaagaccagcctggcgaacacagtgaaaccctgtctctactacaaatataaaaaaagaaaaaacattagctgggtgtggtggtgcatgcctgtaatcccagctacttgggaggctgaggcaggagaatcgcttgaatctgggaggcagaggttgcagtgagccaagatcgcaccattgcactccagcctgggtgatagaatgagactctgtctcaaaaaaaaaaaaaaaaaaaaaaaaagatttgatggagctgtctccaaaattaagaagaggatgaaaggagctgacccagacactcaagcagggctaattattccccttttacagatgtggaagactgaggcctgttgaaagtgcagagctcagccctggcaccctctgttcccaagagctccatgcaggtgccacaggatggagaagaccttgctggccaaccttggtaccacggcctcctgtcccgccaggtaccacccacagcaggacctcagcaccatctggtggggagcctctcccacccttgctgaggattcctgggtccctggatgagggacttagtgccaaggtctattgggacaggtggcagagggctggggactgtcttgaaggttggctggctggggactgtcactatatttaaattatcactttctttgggatgatgagattggtgatggagcttaaggagagtcctaatgcccccaaactactcttggctctggccgtctctccctctgaactccatctacctcctggtatttccctctaaatgtgaggctcccaagccaggcatggtggctcacgcctgtaatcccaacagtttgaaaggccgaggtgggcggatcacttgaagtcaggagttcaagaccagcctggccaacattgtgaaaccccatctctaataaaaatacaaaaattagccagacatggtggtatgcgcctgtagtctcagctacttgggaggctgaggcaggagaatctcttgaacccaggaggcagaggttgtagtgagccacaattgtgccactgcactccagactgggtaacagagcgagactctgtcaaaaacataaataaataaacaaacaaataaatctgaggctcccacctccatctgaaactcagttgtcacccccaaaaattctgggaccctgagcatctcatgaaatcatgagaggcagtagaacttaatagttaaaatcccataattgagacccagacaccctaggttcaaatccaaaccctacaatttatattgtatgtgaccttgggcaggacatttgacctctctgggcctcagtctcccgatctttaacatagggatagcaggccaggcatgttggctcatgcctgtaatcccagcactttgggaggctgaggcaggaggatcacttgaggtcaggagttccaaaccagtctgggcaacatagcagaactctgtctctacacaaaaaaaaaaaaaaaagcgaaaattatccaggcatgggtggcatgtacctgttgtcccaactactcaggaggctgagatgggaggattgcttaagcccaggaggtcaaggctgtgagtgagccatgagtgctccactgcactcagcctgggcaatcgagagagaccttgactcaaaaaaaaaaaaaaaaaaaaaaggccggaagaaaaaaatgggccgggcatggtgactcatgcctgtaatcctagcactttgggaggccgaggtgggtagatcacctgaagtcaggagttcgagaccagcctgacctatatgatgaaaccccctctctactaaaaatacaaaaaagtagccaggcatggtggcatgcacctgtaatcccagctactcgggaggctgagacagcagaatcgcttgaacccaggaggcagaggttgcagtgagccgagattgtgccattgcactccagcctgagcaacaagagtgaaactccgtcccaaagaacaacaacaaaaaaaggtataataatacctaccacccttgttacaggaattacaagagttaacaccctttacatttaaagcagtgcttgacatatagtaagggctacacacgtgtgtctgctacatctattatttagtccccagaccccatgttcagctctactttgcctctctctggggtcctggcccttctacctgcctccccaagccttttttttgtttttttttttgttttttttttgtttttgagacatgatctcactctgtcacccatgctggagtgcaatggctccatctcggctcactgcaacctctgcctcctgggttcaagcgattctcccacctcagcctcctgagtagctggaatgacaggtgcacaccaccacgctcagctaatttttatattttttggtagagacagggttttgccatgttgcccaggctggtctcaaactcctgatctcaagtgatctgcctacctcagcctcccaaagtgctgggattacaggtgtgagccactgtgccccacccttcctaccctattttgacaccagccaccacagctggcataagactgcttgcaaatgtttataaaagagggggccccaatctggaagcatccagctaatggcttctcttgaagccacatttgcataacaagcacagtgcatttaccaaattagatgttgcattggtcagcatcagctagtggctgtaacaaacattcccaagatatcaccagctaaacacagtcaacatgttaatgtcatagtccaaggtggttgagaagcagagatgcaaagctccataaatcagttgggagccaagtgcatcttgtagctctgtcatccctctgggctttgggggatatcagctgacagacaggggacacaacctataagattgtgcagcagggttttatgcgccaggtctggatatttcccatagcccttctaccccacatcccattggccagttctcatcacatgacaaccctagccgcaagggaacctgggaaatgtagtctacgtaggtgccaggagaaagggggacagaacttggtgtgaaagttccccgtctttgcctgccacagaagtttcactggggtagcttttcttgggtggtgggggcaatggtggggggagctaccattaaccactgccctggactcattcctaattcccctgccccctgaacttcatccacagaaggctgaagctcttcttcagcaaaatggcgacttcctggttcgcgcctctgggtcccgtgggggcaaccccgtgatctcctgccgctggcggggctcagccctccattttgaggtgttccgtgtggccctgcgtccccggccaggccgacccacagccctctttcaactggaggatgagcaattccccagcataccggctctggttcacagttatatgacaggcaggcgcccactgtcccaggccacaggggctgtggtctccaggcctgtgacttggcaggggcctctgcgacgcagctttagcgaggacaccctgatggatggcccagctcggatagagcctctcaggtactcacagtctccctgcctccttgagaacacccaacactcgcagggttttccaactcaatggttgactttttttttttttgactgagtctcactctgttgcccaggctggagtgcagtggcatgatttcagctcactgcaacctccacctctcaggttcaagcgattctcctgcctcagcctccagagtagctgggattacaggagtgcaccaccacgcccagctaatttttttacttttttattttttatttttctctggagtcgaagtctcactctgttgcccaggctggagtgcaatggcacgatctcagcccactgcaacctccgcctcccgggttcaagcaattctcctgtctcagcttcccgagtagctgggattacaggcgtgcaccaccatgcctggctaattttttgtatttttagtagagacggggtttcaccatgttggccaggctggtctcaaactcctgacctcaagtgatccacccgcctcggcctcccaaagtgctgggattacaggcatgagccaccacgcctggctaattttttgtatttttagtagagacagggtttcaccatgttggcctggctggtcttgaacttttgacctcacgtgaccgcccgcctcagcctcccatagtgctgggattacaggtgtgagccaccgcacccggccttggttgacttttgaggcccgaacattcttagttgtgggggaggaggtggagatgtcctgtgcatcatagggtgctgagcagcattcctgagctccatccaactagatgctactagttgtgacaactaaagatgtctccacacgttgctaagagtcccctggacgtaggtcaccttgattggttgagactcactggtacagagtaactggacacagggttttgcagatattggtgggggacactgcttaggtggggactacaggtttctcccacttctgtcccccagggcaaggaagtggagcaacagtcagcctgcagatttggcacatatggggcggtcaagagaagaccccgctgggatgggtaagtgtctgctagaatggcctgtggctcagggattggctctgccactcaccacctaagagatcttggtcaggtgcaggcacctcttcgagcctcaatttcttgctttagaaaatgatgacaatcacgatgacttaaaacatgcagggactttgtgggtgcttaaaatgtgtgtttacaaggctgagcgcggtggctcatgcctgtaatcccagcactttgggaggccgaggccggtggatcacttgaggtcaggaattcgagaccagccttgccaacatggtgaaaccccatctccactaaaaacacaaaattagccgagcgtggtggcacgcacctgtaatcccagctactctggaggctgcggcaggagaatcgcttgaacctgggaggtggaggttgcagtgagccgagatggcgctaccgcactccagactgggtgacagaacaaaactccatctcaaaaaaaaaaaaaagtgtttacaattattccaaggagctgtacctgttctgaccacagcttaccttgctaacaacttctgctacgtaccctcctcatgctggtcacacagccctccttgcagttgttcgaaccctcaggcttttattcccgcctcggggcctttgcattttacatttccaccagtgacgggaacattctcattcccctaattttttcctgagtggctcctctccatccagggtaagttcctcaaagcagttgagtctgacggtcttacctaaaggaggactcacctgaatgccccctcatgccccttttttcccatccttctcccaaccccattcaacatgagccgtccctgcatcccaggccctgcacggagtgctaggatacatcaacaaaccagaaagagacaaagatccctgcccgatgggagccaacagtccacgagaggacaacaaaccatgaaccacaaaaataaggcaattttgtttgcttcaagatgaaaattaaaacacaggaagggaaggccaggcacagtggctcaggcctgtaatcccagcactttggaaggccaaggcgggcggatcacctaaagtcaggagttcgagaccagcctggccaacatggcgaaaccccgtctctactaaaactacaaaaattagccgggcgtggtggtacacacctgtaatcccagctactcgggagactcgggaggctgaggcacgagaattgcttgaacccgggaggcagaggttgccgtgagccaagattgcaccactgcactccagcctggacaacagagtgagactctgtctcaaaaaacaaacaaacaaacaaaaaacagtaagggaagggtgaggtggctcaggtctgtaatcctagcactttgggaggccaaggtgggcggatcacttgaggtcaggagttcgagaccagcctggccaacatggtgaaaacccatctctactaaaaaaaaataaaataaaataaaatacaaaaattagccaggtgtagtggcatatgcctgtaatccaagctacttgggacagagtgagactgtctcaaaaaaaccgaaaaaacaaaaacaaaacaaaacaaaaaaaacagagtaagggagatagagactataaagatggagatgtatattgcaattttattttatttctatttatttatttatttttgagatagagttttgctcttgttgcccaggatggagtgcaatggcgtgataccggctcactgcaacctccacctcctgggttcaagtgattctcctgcctcagcctcccgagtagctgggattacaggcatgtgcaccacgccctgctaattttgtatttttagtggagatggggtttccccatgttggtcaggctggtctcgaactcctgacctcaggtgatccacccacctcaacctcccaaagtgctgggattacaggcgtgagccattgtacccaagcaagcaattttaagtggtagtcaggaaaggccccattgcagaaaaaaataaaattgaaggaaatgagggagggaacaggtggataactgggggataagcaggcaggaggaagaggcagtgcaaaggctcttgggtcagaacaagaatttaagctgttcattcaaccaaaaaatgagtgggtagctgggtgtggtgttgcacgcctgtggtcctagccacttgggaggttgaagcaggaggactccttgaacccagaaagtcaaggctgcagtgagccgtgatcgcaccattgcactccagcctgggccacagagtgagaccctgactcaaatttaaaaaaaaaaaaaaaaagaagaagaaaagaaagggctgggtgcaatggctcaatttcttcttaaaaaaaaaaaaaaaaagatacacgtgcagaatgtgcaggttgagcctattcaaaggcatggtaaatacagtctcccaaaagtcttagtacagttttaagtactaatagtccagaaattacaagcctgtaatcccagcactttgggaggccaaagcgggcggatcacgaggtcaagagatcaagaccatcctggccaacatggtgaaaccccgtgtctactaaaaatacaaaaattagctgggtgtggtggcgcctgtggtcccagctactcgggaggctgaagcaggagaatcacttgaacccgggaggcagaggttgcaataagccgagatggcgccactgcactgtagcctggtgacagagtgagactccgtcaagaaagaaaagaaaggaaggaaggaaggaacgaagggagggagggaaggagggacacacgagtgtagctgaagcagagggaatgaggggagagtcagagagagagaccctggggctcagattgtgaggatttttcagctactgtgagcactttggaccttaactcagagtgagccaggcactgttggatgatttcaagttcctagaaaagagcctattcaaaggcatggtaaatacagtctcccaaaagtcttagtacagttttaagtactaatagtccaggagatcaacatgccaccaacttacaaaggacgtcatttgaaagtttacgatgaggggagggaacttagaggaggggtcagtaggtgcagcaaaccaccatggcacacagatactgaacctgcacattctgcacatgtatctttttttttaagaagaaataaaaaagaaaaaaaagaaaagaaagtttaataagcttggtttctttgacacttatctgagtgtcataccatacgcagctttgtgaattttttatactttgtctctctatagatatctatattaattgtatatattttatatagatatgtctatggagagatatattatcacaaaaaaagtaaaatatctatcatatataaatgtaattatatgtagtatatagggcaacattatacatttaataatgttaattttatttaacatatacttaatttaaatatatattatatatttatataatatatatctatctctatagatatgatatagagagatatatcacttaattgtagatagatagatatcttttttttttttttgagacagggtcttactctgtcatccaagctggagtgcagtggtgcagtcatacctcactgcagcctctggctcaagtgatcctcccacctctgcctcccaagtagctgggaccacaggtgcatgccaccatgcccagctaattttctaactttttgtagaaacaagatcttgttatgttgcccaggctggtctggaatccctagcctcaagcaatcctctcaccttggcctcccaaaatgctgagattacaggcgtcggccaccacgctcatcctttttttaaaaaaatttttaatttcgttgggtcactgcttaccatctttcagtcagaggggcaaaaacaaagaattcaaatttaaaatgtagtattcagaattcatagggtcaggcaaggtggctcatgcctgtgatcccagcagtttgggaggccgaggagggaggattgcttgagactaggaattccagaccagcctgggcaacacagtgagatcccatctctataaaataaaataaaattaaaaaaaaataatttacagaactatagagatgctaaagttttctaaccatgtgtaagcatgtagcatttctaccgtcgaggtggttgaaattcaaaactgcacccggataggttgttataccccattattggaatgagtggatggatcaggtgggtggtagccgatgaagctctcacccccgcccattcagcaatcttccctgtgtattcccattgacccctcttgtatgacctctagaagcctccaccatgcccatatctgccttgccccgaacgagcagtgacccggtgttgctgaaggcccctgctcccctgggaactgttgccgacagtctcagggcctccgatgggcagcttcaagccaaggcaccaacgaagcccccccggacaccctccttcgaactgcctgatgcctctgaacgtcccccgacgtactgcgagctggtgccccgagtgcccagtgtccagggaacatccccgagccaaagctgcccagagccagaggccccatggtgggaggccgaggaggatgaggaggaagagaatagatgttttacaagaccacaggctgagatctctttctgcccccatgatgccccctcctgcctgctgggcccccagaatcggcccctggaaccccaagtcctg

SEQ ID NO: 13956 - DNA, 586 bp, Homo sapiens
tggacccagcctcgtgggagccccgcgggtcctgcccagatgtggaagactgaggcctgttgaaagtgcagagctcagccctggcaccctctgttcccaagagctccatgcaggtgccacaggatggagaagaccttgctggccaaccttggtaccacggcctcctgtcccgccagaagcctccaccatgcccatatctgccttgccccgaacgagcagtgacccggtgttgctgaaggcccctgctcccctgggaactgttgccgacagtctcagggcctccgatgggcagcttcaagccaaggcaccaacgaagcccccccggacaccctccttcgaactgcctgatgcctctgaacgtcccccgacgtactgcgagctggtgccccgagtgcccagtgtccagggaacatccccgagccaaagctgcccagagccagaggccccatggtgggaggccgaggaggatgaggaggaagagaatagatgttttacaagaccacaggctgagatctctttctgcccccatgatgccccctcctgcctgctgggcccccagaatcggcccctggaaccccaagtcctg

SEQ ID NO: 13957 - DNA, 12848 bp, Homo sapiens
tgacagcagcccggagccgcggagcctcagcttccgcctggacccagcctcgtgggagccccgcgggtcctgcccaggtgagtggagccccagggcagatccagaaccaggattattgggatggggagtcctctctttccaggtggggtcaccggctcgcagggaggatctggggtagaagaggtcgcctcgcgaatgagagggtcgctgtgcgttacgcgtgtcggtgtgctcgggctcacctgggcgtgcctctctaagtgtatttcctgtgcagcacagaaagccattgtttccatttttgcctgagtgatcctcttaaacggcgaatcagatcgggcccctccttcacttaaaacccttgggtcatagagattaaaattcaaagtccactagtttttgcctagtctctcctcctgatctctccaacctcattgccctcctatctactccttcctcatcgtattccggctacaccagccgccttgatgatgtaaaatgtaaaaagcaagtccatctcagctccaggcctttacccttactgtacccctcacccaggcgactcctccaaatctttgcctaactgcctccttctgtactgaggtctcagttccaatgtcactttataggagaggctgtcctgtccagcctcctctatcacatctccctggcttatcactttcattgataactcttagaaatggtctgtcttctccattcatcttgtgctcgtttgcagtctgtcttgcgcagccgactgcaagctctggagggcagggtggtgccgagctttaatctccttagtcactgtatctctaggtcctagaacagagcctggtgcacagcaagtgctccagcaatggtcgtccaacgtcaaaagcgagtcctgcctacatctgtgtttgtgttgcctgtgctggtggttcccaccctccacgtcctccccacacgtggacacatgtttatgatccaactggaacatgaataatcccctctctcctctctctatgcttggtctgattcctgattctgcccgtttcttctcttccgtgcccgaataaatgatcccaaaggactcagaggcaggagatggcttagttggcctttggctgacctatggccaccctgtgtcctcaaactaaccagaaccttgccattgactcaacttcactctcactaagggagacacaagacaggaacttggggttgggaaactctgcgaccgaggctagccctggtccaggtgacaaacaggaagtgcgcaggcattgcaaagacacacctggcttcaggtatgcggcactggcagctggctccctgcccagcgctcctcccctaaagccacctagggctggtctgggaacttcctgctgactcaggaggcaggaatttctctgcagaccccaccagaagactttgcagggctgcagggagagcttgcaggagagtaagaagcagattatcttcttctggaccatccagagaaatctcccccaccagacacctgagacacactggccctgaggcctgtgagattatcgggaaactaccaaaatgtctgagatccaaattcaatcatcatgataaccacatgtatgggctccgaaatagaaggatctgcaaaggcaacattgctgtttgctgacattgctacaaaatgtgaccttttaaaaatcttaaccctggggttacattcttttttttttttttttttttgagacggagtcttgctctgtcacccaggctggagtgcagtggtgtgatctcggttcactgcagggtctgcctcctggattcaagcgattctctctcctcagcctcctgagtagctgggactacaggcacacgccaccatgcctggctaatttttgtatttttagtagagacggggtttcactgtgttgaccaggctggtctcaaactcctgacctcagatgatccacccacctctgcctcccaaagtgctaggattacaagagtgagccaccgcgcctggcccccagcgttgcattctaaagcaaagaataggggttagatctgcacctatcctgagaacctctgagtgtgcgcataggttgccgagaagccatggatgtttgtaagttaaattccccctgactgggatgttttttcacccagagtcacctggcacactccccagaattccttccagactttactcaatgagacctttcctggtcacatgatcaaaaatgttcacccagcctgggcaacgtggcaagacccaatctctacatatatatttaaaaattagccaggcacagccagacgcagtggctcatgctggtaatcccagtgctttgggaggctgaggagggtggatcacctgaggtcaggagttcgagaccagcctggccaacatggagaaaccccatctctattaaaaatattttaaaaattagccaggcatggtggcacacacctgtagtcccagctactgaggaggccgatgcacgagaattgcttgaaaccagcaggcggaagttgcaatgaactgagatcatgccactgcactccagcctgggcaacagagtgagacttgatctcaaaaaaaaaaaaaaaaaaaaaaattagccaggtacagtggcccacgctcatagtcccagctactcagaaggatgaggtgggagaatcacttgagcccaggaggtcaaggccgcaatgagctgtgattgcaccactgcagtccagcctgggcaataaagcaagactctgtctcaaaaaaaaaagagtgttcaccctagcacctgtactttcattatatcccatccatggtttagtttttttgtctagcactcactcatgtatgccatcatctagttcttttctgaggtgctgctccccagtagaatgtcagctcccaaggacagagatttccatctgttttgttcaatgctatgtctctagggcctagaacagagcctgggaccccataaggtgctgaataaataggggttcagtgaattcattaattacatttctgcaagatggggtggcatgttgtcatcttcagccattttttttttcttcgattgcattatatttggaacaggcacgatggtgacatctgtaatcccaactacttgggaggctgaggctagaggattccttgagcccaggaattcaaggctaaagtgtgctatgatcacacctgtgaatagcactgcactccagcctgggcaacacataagacctctctctttaaatgtaaaaaaaaaagtctgcgtgcagtggcttatgcctgtaatcccagcactttgggaggctgaggcaggtggatcacctgaggtcaggagttcaagaccagcctggcgaacacagtgaaaccctgtctctactacaaatataaaaaaagaaaaaacattagctgggtgtggtggtgcatgcctgtaatcccagctacttgggaggctgaggcaggagaatcgcttgaatctgggaggcagaggttgcagtgagccaagatcgcaccattgcactccagcctgggtgatagaatgagactctgtctcaaaaaaaaaaaaaaaaaaaaaaaaagatttgatggagctgtctccaaaattaagaagaggatgaaaggagctgacccagacactcaagcagggctaattattccccttttacagatgtggaagactgaggcctgttgaaagtgcagagctcagccctggcaccctctgttcccaagagctccatgcaggtgccacaggatggagaagaccttgctggccaaccttggtaccacggcctcctgtcccgccaggtaccacccacagcaggacctcagcaccatctggtggggagcctctcccacccttgctgaggattcctgggtccctggatgagggacttagtgccaaggtctattgggacaggtggcagagggctggggactgtcttgaaggttggctggctggggactgtcactatatttaaattatcactttctttgggatgatgagattggtgatggagcttaaggagagtcctaatgcccccaaactactcttggctctggccgtctctccctctgaactccatctacctcctggtatttccctctaaatgtgaggctcccaagccaggcatggtggctcacgcctgtaatcccaacagtttgaaaggccgaggtgggcggatcacttgaagtcaggagttcaagaccagcctggccaacattgtgaaaccccatctctaataaaaatacaaaaattagccagacatggtggtatgcgcctgtagtctcagctacttgggaggctgaggcaggagaatctcttgaacccaggaggcagaggttgtagtgagccacaattgtgccactgcactccagactgggtaacagagcgagactctgtcaaaaacataaataaataaacaaacaaataaatctgaggctcccacctccatctgaaactcagttgtcacccccaaaaattctgggaccctgagcatctcatgaaatcatgagaggcagtagaacttaatagttaaaatcccataattgagacccagacaccctaggttcaaatccaaaccctacaatttatattgtatgtgaccttgggcaggacatttgacctctctgggcctcagtctcccgatctttaacatagggatagcaggccaggcatgttggctcatgcctgtaatcccagcactttgggaggctgaggcaggaggatcacttgaggtcaggagttccaaaccagtctgggcaacatagcagaactctgtctctacacaaaaaaaaaaaaaaaagcgaaaattatccaggcatgggtggcatgtacctgttgtcccaactactcaggaggctgagatgggaggattgcttaagcccaggaggtcaaggctgtgagtgagccatgagtgctccactgcactcagcctgggcaatcgagagagaccttgactcaaaaaaaaaaaaaaaaaaaaaaggccggaagaaaaaaatgggccgggcatggtgactcatgcctgtaatcctagcactttgggaggccgaggtgggtagatcacctgaagtcaggagttcgagaccagcctgacctatatgatgaaaccccctctctactaaaaatacaaaaaagtagccaggcatggtggcatgcacctgtaatcccagctactcgggaggctgagacagcagaatcgcttgaacccaggaggcagaggttgcagtgagccgagattgtgccattgcactccagcctgagcaacaagagtgaaactccgtcccaaagaacaacaacaaaaaaaggtataataatacctaccacccttgttacaggaattacaagagttaacaccctttacatttaaagcagtgcttgacatatagtaagggctacacacgtgtgtctgctacatctattatttagtccccagaccccatgttcagctctactttgcctctctctggggtcctggcccttctacctgcctccccaagccttttttttgtttttttttttgttttttttttgtttttgagacatgatctcactctgtcacccatgctggagtgcaatggctccatctcggctcactgcaacctctgcctcctgggttcaagcgattctcccacctcagcctcctgagtagctggaatgacaggtgcacaccaccacgctcagctaatttttatattttttggtagagacagggttttgccatgttgcccaggctggtctcaaactcctgatctcaagtgatctgcctacctcagcctcccaaagtgctgggattacaggtgtgagccactgtgccccacccttcctaccctattttgacaccagccaccacagctggcataagactgcttgcaaatgtttataaaagagggggccccaatctggaagcatccagctaatggcttctcttgaagccacatttgcataacaagcacagtgcatttaccaaattagatgttgcattggtcagcatcagctagtggctgtaacaaacattcccaagatatcaccagctaaacacagtcaacatgttaatgtcatagtccaaggtggttgagaagcagagatgcaaagctccataaatcagttgggagccaagtgcatcttgtagctctgtcatccctctgggctttgggggatatcagctgacagacaggggacacaacctataagattgtgcagcagggttttatgcgccaggtctggatatttcccatagcccttctaccccacatcccattggccagttctcatcacatgacaaccctagccgcaagggaacctgggaaatgtagtctacgtaggtgccaggagaaagggggacagaacttggtgtgaaagttccccgtctttgcctgccacagaagtttcactggggtagcttttcttgggtggtgggggcaatggtggggggagctaccattaaccactgccctggactcattcctaattcccctgccccctgaacttcatccacagaaggctgaagctcttcttcagcaaaatggcgacttcctggttcgcgcctctgggtcccgtgggggcaaccccgtgatctcctgccgctggcggggctcagccctccattttgaggtgttccgtgtggccctgcgtccccggccaggccgacccacagccctctttcaactggaggatgagcaattccccagcataccggctctggttcacagttatatgacaggcaggcgcccactgtcccaggccacaggggctgtggtctccaggcctgtgacttggcaggggcctctgcgacgcagctttagcgaggacaccctgatggatggcccagctcggatagagcctctcaggtactcacagtctccctgcctccttgagaacacccaacactcgcagggttttccaactcaatggttgactttttttttttttgactgagtctcactctgttgcccaggctggagtgcagtggcatgatttcagctcactgcaacctccacctctcaggttcaagcgattctcctgcctcagcctccagagtagctgggattacaggagtgcaccaccacgcccagctaatttttttacttttttattttttatttttctctggagtcgaagtctcactctgttgcccaggctggagtgcaatggcacgatctcagcccactgcaacctccgcctcccgggttcaagcaattctcctgtctcagcttcccgagtagctgggattacaggcgtgcaccaccatgcctggctaattttttgtatttttagtagagacggggtttcaccatgttggccaggctggtctcaaactcctgacctcaagtgatccacccgcctcggcctcccaaagtgctgggattacaggcatgagccaccacgcctggctaattttttgtatttttagtagagacagggtttcaccatgttggcctggctggtcttgaacttttgacctcacgtgaccgcccgcctcagcctcccatagtgctgggattacaggtgtgagccaccgcacccggccttggttgacttttgaggcccgaacattcttagttgtgggggaggaggtggagatgtcctgtgcatcatagggtgctgagcagcattcctgagctccatccaactagatgctactagttgtgacaactaaagatgtctccacacgttgctaagagtcccctggacgtaggtcaccttgattggttgagactcactggtacagagtaactggacacagggttttgcagatattggtgggggacactgcttaggtggggactacaggtttctcccacttctgtcccccagggcaaggaagtggagcaacagtcagcctgcagatttggcacatatggggcggtcaagagaagaccccgctgggatgggtaagtgtctgctagaatggcctgtggctcagggattggctctgccactcaccacctaagagatcttggtcaggtgcaggcacctcttcgagcctcaatttcttgctttagaaaatgatgacaatcacgatgacttaaaacatgcagggactttgtgggtgcttaaaatgtgtgtttacaaggctgagcgcggtggctcatgcctgtaatcccagcactttgggaggccgaggccggtggatcacttgaggtcaggaattcgagaccagccttgccaacatggtgaaaccccatctccactaaaaacacaaaattagccgagcgtggtggcacgcacctgtaatcccagctactctggaggctgcggcaggagaatcgcttgaacctgggaggtggaggttgcagtgagccgagatggcgctaccgcactccagactgggtgacagaacaaaactccatctcaaaaaaaaaaaaaagtgtttacaattattccaaggagctgtacctgttctgaccacagcttaccttgctaacaacttctgctacgtaccctcctcatgctggtcacacagccctccttgcagttgttcgaaccctcaggcttttattcccgcctcggggcctttgcattttacatttccaccagtgacgggaacattctcattcccctaattttttcctgagtggctcctctccatccagggtaagttcctcaaagcagttgagtctgacggtcttacctaaaggaggactcacctgaatgccccctcatgccccttttttcccatccttctcccaaccccattcaacatgagccgtccctgcatcccaggccctgcacggagtgctaggatacatcaacaaaccagaaagagacaaagatccctgcccgatgggagccaacagtccacgagaggacaacaaaccatgaaccacaaaaataaggcaattttgtttgcttcaagatgaaaattaaaacacaggaagggaaggccaggcacagtggctcaggcctgtaatcccagcactttggaaggccaaggcgggcggatcacctaaagtcaggagttcgagaccagcctggccaacatggcgaaaccccgtctctactaaaactacaaaaattagccgggcgtggtggtacacacctgtaatcccagctactcgggagactcgggaggctgaggcacgagaattgcttgaacccgggaggcagaggttgccgtgagccaagattgcaccactgcactccagcctggacaacagagtgagactctgtctcaaaaaacaaacaaacaaacaaaaaacagtaagggaagggtgaggtggctcaggtctgtaatcctagcactttgggaggccaaggtgggcggatcacttgaggtcaggagttcgagaccagcctggccaacatggtgaaaacccatctctactaaaaaaaaataaaataaaataaaatacaaaaattagccaggtgtagtggcatatgcctgtaatccaagctacttgggacagagtgagactgtctcaaaaaaaccgaaaaaacaaaaacaaaacaaaacaaaaaaaacagagtaagggagatagagactataaagatggagatgtatattgcaattttattttatttctatttatttatttatttttgagatagagttttgctcttgttgcccaggatggagtgcaatggcgtgataccggctcactgcaacctccacctcctgggttcaagtgattctcctgcctcagcctcccgagtagctgggattacaggcatgtgcaccacgccctgctaattttgtatttttagtggagatggggtttccccatgttggtcaggctggtctcgaactcctgacctcaggtgatccacccacctcaacctcccaaagtgctgggattacaggcgtgagccattgtacccaagcaagcaattttaagtggtagtcaggaaaggccccattgcagaaaaaaataaaattgaaggaaatgagggagggaacaggtggataactgggggataagcaggcaggaggaagaggcagtgcaaaggctcttgggtcagaacaagaatttaagctgttcattcaaccaaaaaatgagtgggtagctgggtgtggtgttgcacgcctgtggtcctagccacttgggaggttgaagcaggaggactccttgaacccagaaagtcaaggctgcagtgagccgtgatcgcaccattgcactccagcctgggccacagagtgagaccctgactcaaatttaaaaaaaaaaaaaaaaagaagaagaaaagaaagggctgggtgcaatggctcaatttcttcttaaaaaaaaaaaaaaaaagatacacgtgcagaatgtgcaggttgagcctattcaaaggcatggtaaatacagtctcccaaaagtcttagtacagttttaagtactaatagtccagaaattacaagcctgtaatcccagcactttgggaggccaaagcgggcggatcacgaggtcaagagatcaagaccatcctggccaacatggtgaaaccccgtgtctactaaaaatacaaaaattagctgggtgtggtggcgcctgtggtcccagctactcgggaggctgaagcaggagaatcacttgaacccgggaggcagaggttgcaataagccgagatggcgccactgcactgtagcctggtgacagagtgagactccgtcaagaaagaaaagaaaggaaggaaggaaggaacgaagggagggagggaaggagggacacacgagtgtagctgaagcagagggaatgaggggagagtcagagagagagaccctggggctcagattgtgaggatttttcagctactgtgagcactttggaccttaactcagagtgagccaggcactgttggatgatttcaagttcctagaaaagagcctattcaaaggcatggtaaatacagtctcccaaaagtcttagtacagttttaagtactaatagtccaggagatcaacatgccaccaacttacaaaggacgtcatttgaaagtttacgatgaggggagggaacttagaggaggggtcagtaggtgcagcaaaccaccatggcacacagatactgaacctgcacattctgcacatgtatctttttttttaagaagaaataaaaaagaaaaaaaagaaaagaaagtttaataagcttggtttctttgacacttatctgagtgtcataccatacgcagctttgtgaattttttatactttgtctctctatagatatctatattaattgtatatattttatatagatatgtctatggagagatatattatcacaaaaaaagtaaaatatctatcatatataaatgtaattatatgtagtatatagggcaacattatacatttaataatgttaattttatttaacatatacttaatttaaatatatattatatatttatataatatatatctatctctatagatatgatatagagagatatatcacttaattgtagatagatagatatcttttttttttttttgagacagggtcttactctgtcatccaagctggagtgcagtggtgcagtcatacctcactgcagcctctggctcaagtgatcctcccacctctgcctcccaagtagctgggaccacaggtgcatgccaccatgcccagctaattttctaactttttgtagaaacaagatcttgttatgttgcccaggctggtctggaatccctagcctcaagcaatcctctcaccttggcctcccaaaatgctgagattacaggcgtcggccaccacgctcatcctttttttaaaaaaatttttaatttcgttgggtcactgcttaccatctttcagtcagaggggcaaaaacaaagaattcaaatttaaaatgtagtattcagaattcatagggtcaggcaaggtggctcatgcctgtgatcccagcagtttgggaggccgaggagggaggattgcttgagactaggaattccagaccagcctgggcaacacagtgagatcccatctctataaaataaaataaaattaaaaaaaaataatttacagaactatagagatgctaaagttttctaaccatgtgtaagcatgtagcatttctaccgtcgaggtggttgaaattcaaaactgcacccggataggttgttataccccattattggaatgagtggatggatcaggtgggtggtagccgatgaagctctcacccccgcccattcagcaatcttccctgtgtattcccattgacccctcttgtatgacctctagaagcctccaccatgcccatatctgccttgccccgaacgagcagtgacccggtgttgctgaaggcccctgctcccctgggaactgttgccgacagtctcagggcctccgatgggcagcttcaagccaaggcaccaacgaagcccccccggacaccctccttcgaactgcctgatgcctctgaacgtcccccgacgtactgcgagctggtgccccgagtgcccagtgtccagggaacatccccgagccaaagctgcccagagccagaggccccatggtgggaggccgaggaggatgaggaggaagagaatagatgttttacaagaccacaggctgagatctctttctgcccccatgatgccccctcctgcctgctgggcccccagaatcggcccctggaaccccaagtcctgcataccctccgtggcctgttcctggagcaccatcctgggagcaccgcccttcacctgctattggtagactgccaggtgggtcacctcctgggatgctcctccccaggcccagggcaagacccaaccatgcctacataatcacgcttcacctgacttccccattcccttctgcaggccacaggcctcctgggagtgaccagagatcagcggggcaacatgggagtctcatctggcctggagctgctcactcttccccatggacaccacttgaggttggaactgctggagag

SEQ ID NO: 13958 - DNA, 859 bp, Homo sapiens
tgacagcagcccggagccgcggagcctcagcttccgcctggacccagcctcgtgggagccccgcgggtcctgcccagatgtggaagactgaggcctgttgaaagtgcagagctcagccctggcaccctctgttcccaagagctccatgcaggtgccacaggatggagaagaccttgctggccaaccttggtaccacggcctcctgtcccgccagaaggctgaagctcttcttcagcaaaatggcgacttcctggttcgcgcctctgggtcccgtgggggcaaccccgtgatctcctgccgctggcggggctcagccctccattttgaggtgttccgtgtggccctgcgtccccggccaggccgacccacagccctctttcaactggaggatgagcaattccccagcataccggctctggttcacagttatatgacaggcaggcgcccactgtcccaggccacaggggctgtggtctccaggcctgtgacttggcaggggcctctgcgacgcagctttagcgaggacaccctgatggatggcccagctcggatagagcctctcagggcaaggaagtggagcaacagtcagcctgcagatttggcacatatggggcggtcaagagaagaccccgctgggatggaatcggcccctggaaccccaagtcctgcataccctccgtggcctgttcctggagcaccatcctgggagcaccgcccttcacctgctattggtagactgccaggccacaggcctcctgggagtgaccagagatcagcggggcaacatgggagtctcatctggcctggagctgctcactcttccccatggacaccacttgaggttggaactgctggagag

SEQ ID NO: 13959 - DNA, 6192 bp, Homo sapiens
taggtgccaggagaaagggggacagaacttggtgtgaaagttccccgtctttgcctgccacagaagtttcactggggtagcttttcttgggtggtgggggcaatggtggggggagctaccattaaccactgccctggactcattcctaattcccctgccccctgaacttcatccacagaaggctgaagctcttcttcagcaaaatggcgacttcctggttcgcgcctctgggtcccgtgggggcaaccccgtgatctcctgccgctggcggggctcagccctccattttgaggtgttccgtgtggccctgcgtccccggccaggccgacccacagccctctttcaactggaggatgagcaattccccagcataccggctctggttcacagttatatgacaggcaggcgcccactgtcccaggccacaggggctgtggtctccaggcctgtgacttggcaggggcctctgcgacgcagctttagcgaggacaccctgatggatggcccagctcggatagagcctctcaggtactcacagtctccctgcctccttgagaacacccaacactcgcagggttttccaactcaatggttgactttttttttttttgactgagtctcactctgttgcccaggctggagtgcagtggcatgatttcagctcactgcaacctccacctctcaggttcaagcgattctcctgcctcagcctccagagtagctgggattacaggagtgcaccaccacgcccagctaatttttttacttttttattttttatttttctctggagtcgaagtctcactctgttgcccaggctggagtgcaatggcacgatctcagcccactgcaacctccgcctcccgggttcaagcaattctcctgtctcagcttcccgagtagctgggattacaggcgtgcaccaccatgcctggctaattttttgtatttttagtagagacggggtttcaccatgttggccaggctggtctcaaactcctgacctcaagtgatccacccgcctcggcctcccaaagtgctgggattacaggcatgagccaccacgcctggctaattttttgtatttttagtagagacagggtttcaccatgttggcctggctggtcttgaacttttgacctcacgtgaccgcccgcctcagcctcccatagtgctgggattacaggtgtgagccaccgcacccggccttggttgacttttgaggcccgaacattcttagttgtgggggaggaggtggagatgtcctgtgcatcatagggtgctgagcagcattcctgagctccatccaactagatgctactagttgtgacaactaaagatgtctccacacgttgctaagagtcccctggacgtaggtcaccttgattggttgagactcactggtacagagtaactggacacagggttttgcagatattggtgggggacactgcttaggtggggactacaggtttctcccacttctgtcccccagggcaaggaagtggagcaacagtcagcctgcagatttggcacatatggggcggtcaagagaagaccccgctgggatgggtaagtgtctgctagaatggcctgtggctcagggattggctctgccactcaccacctaagagatcttggtcaggtgcaggcacctcttcgagcctcaatttcttgctttagaaaatgatgacaatcacgatgacttaaaacatgcagggactttgtgggtgcttaaaatgtgtgtttacaaggctgagcgcggtggctcatgcctgtaatcccagcactttgggaggccgaggccggtggatcacttgaggtcaggaattcgagaccagccttgccaacatggtgaaaccccatctccactaaaaacacaaaattagccgagcgtggtggcacgcacctgtaatcccagctactctggaggctgcggcaggagaatcgcttgaacctgggaggtggaggttgcagtgagccgagatggcgctaccgcactccagactgggtgacagaacaaaactccatctcaaaaaaaaaaaaaagtgtttacaattattccaaggagctgtacctgttctgaccacagcttaccttgctaacaacttctgctacgtaccctcctcatgctggtcacacagccctccttgcagttgttcgaaccctcaggcttttattcccgcctcggggcctttgcattttacatttccaccagtgacgggaacattctcattcccctaattttttcctgagtggctcctctccatccagggtaagttcctcaaagcagttgagtctgacggtcttacctaaaggaggactcacctgaatgccccctcatgccccttttttcccatccttctcccaaccccattcaacatgagccgtccctgcatcccaggccctgcacggagtgctaggatacatcaacaaaccagaaagagacaaagatccctgcccgatgggagccaacagtccacgagaggacaacaaaccatgaaccacaaaaataaggcaattttgtttgcttcaagatgaaaattaaaacacaggaagggaaggccaggcacagtggctcaggcctgtaatcccagcactttggaaggccaaggcgggcggatcacctaaagtcaggagttcgagaccagcctggccaacatggcgaaaccccgtctctactaaaactacaaaaattagccgggcgtggtggtacacacctgtaatcccagctactcgggagactcgggaggctgaggcacgagaattgcttgaacccgggaggcagaggttgccgtgagccaagattgcaccactgcactccagcctggacaacagagtgagactctgtctcaaaaaacaaacaaacaaacaaaaaacagtaagggaagggtgaggtggctcaggtctgtaatcctagcactttgggaggccaaggtgggcggatcacttgaggtcaggagttcgagaccagcctggccaacatggtgaaaacccatctctactaaaaaaaaataaaataaaataaaatacaaaaattagccaggtgtagtggcatatgcctgtaatccaagctacttgggacagagtgagactgtctcaaaaaaaccgaaaaaacaaaaacaaaacaaaacaaaaaaaacagagtaagggagatagagactataaagatggagatgtatattgcaattttattttatttctatttatttatttatttttgagatagagttttgctcttgttgcccaggatggagtgcaatggcgtgataccggctcactgcaacctccacctcctgggttcaagtgattctcctgcctcagcctcccgagtagctgggattacaggcatgtgcaccacgccctgctaattttgtatttttagtggagatggggtttccccatgttggtcaggctggtctcgaactcctgacctcaggtgatccacccacctcaacctcccaaagtgctgggattacaggcgtgagccattgtacccaagcaagcaattttaagtggtagtcaggaaaggccccattgcagaaaaaaataaaattgaaggaaatgagggagggaacaggtggataactgggggataagcaggcaggaggaagaggcagtgcaaaggctcttgggtcagaacaagaatttaagctgttcattcaaccaaaaaatgagtgggtagctgggtgtggtgttgcacgcctgtggtcctagccacttgggaggttgaagcaggaggactccttgaacccagaaagtcaaggctgcagtgagccgtgatcgcaccattgcactccagcctgggccacagagtgagaccctgactcaaatttaaaaaaaaaaaaaaaaagaagaagaaaagaaagggctgggtgcaatggctcaatttcttcttaaaaaaaaaaaaaaaaagatacacgtgcagaatgtgcaggttgagcctattcaaaggcatggtaaatacagtctcccaaaagtcttagtacagttttaagtactaatagtccagaaattacaagcctgtaatcccagcactttgggaggccaaagcgggcggatcacgaggtcaagagatcaagaccatcctggccaacatggtgaaaccccgtgtctactaaaaatacaaaaattagctgggtgtggtggcgcctgtggtcccagctactcgggaggctgaagcaggagaatcacttgaacccgggaggcagaggttgcaataagccgagatggcgccactgcactgtagcctggtgacagagtgagactccgtcaagaaagaaaagaaaggaaggaaggaaggaacgaagggagggagggaaggagggacacacgagtgtagctgaagcagagggaatgaggggagagtcagagagagagaccctggggctcagattgtgaggatttttcagctactgtgagcactttggaccttaactcagagtgagccaggcactgttggatgatttcaagttcctagaaaagagcctattcaaaggcatggtaaatacagtctcccaaaagtcttagtacagttttaagtactaatagtccaggagatcaacatgccaccaacttacaaaggacgtcatttgaaagtttacgatgaggggagggaacttagaggaggggtcagtaggtgcagcaaaccaccatggcacacagatactgaacctgcacattctgcacatgtatctttttttttaagaagaaataaaaaagaaaaaaaagaaaagaaagtttaataagcttggtttctttgacacttatctgagtgtcataccatacgcagctttgtgaattttttatactttgtctctctatagatatctatattaattgtatatattttatatagatatgtctatggagagatatattatcacaaaaaaagtaaaatatctatcatatataaatgtaattatatgtagtatatagggcaacattatacatttaataatgttaattttatttaacatatacttaatttaaatatatattatatatttatataatatatatctatctctatagatatgatatagagagatatatcacttaattgtagatagatagatatcttttttttttttttgagacagggtcttactctgtcatccaagctggagtgcagtggtgcagtcatacctcactgcagcctctggctcaagtgatcctcccacctctgcctcccaagtagctgggaccacaggtgcatgccaccatgcccagctaattttctaactttttgtagaaacaagatcttgttatgttgcccaggctggtctggaatccctagcctcaagcaatcctctcaccttggcctcccaaaatgctgagattacaggcgtcggccaccacgctcatcctttttttaaaaaaatttttaatttcgttgggtcactgcttaccatctttcagtcagaggggcaaaaacaaagaattcaaatttaaaatgtagtattcagaattcatagggtcaggcaaggtggctcatgcctgtgatcccagcagtttgggaggccgaggagggaggattgcttgagactaggaattccagaccagcctgggcaacacagtgagatcccatctctataaaataaaataaaattaaaaaaaaataatttacagaactatagagatgctaaagttttctaaccatgtgtaagcatgtagcatttctaccgtcgaggtggttgaaattcaaaactgcacccggataggttgttataccccattattggaatgagtggatggatcaggtgggtggtagccgatgaagctctcacccccgcccattcagcaatcttccctgtgtattcccattgacccctcttgtatgacctctagaagcctccaccatgcccatatctgccttgccccgaacgagcagtgacccggtgttgctgaaggcccctgctcccctgggaactgttgccgacagtctcagggcctccgatgggcagcttcaagccaaggcaccaacgaagcccccccggacaccctccttcgaactgcctgatgcctctgaacgtcccccgacgtactgcgagctggtgccccgagtgcccagtgtccagggaacatccccgagccaaagctgcccagagccagaggccccatggtgggaggccgaggaggatgaggaggaagagaatagatgttttacaagaccacaggctgagatctctt

SEQ ID NO: 13960 - DNA, 845 bp, Homo sapiens
taggtgccaggagaaagggggacagaacttggtgtgaaagttccccgtctttgcctgccacagaagtttcactgggaaggctgaagctcttcttcagcaaaatggcgacttcctggttcgcgcctctgggtcccgtgggggcaaccccgtgatctcctgccgctggcggggctcagccctccattttgaggtgttccgtgtggccctgcgtccccggccaggccgacccacagccctctttcaactggaggatgagcaattccccagcataccggctctggttcacagttatatgacaggcaggcgcccactgtcccaggccacaggggctgtggtctccaggcctgtgacttggcaggggcctctgcgacgcagctttagcgaggacaccctgatggatggcccagctcggatagagcctctcagggcaaggaagtggagcaacagtcagcctgcagatttggcacatatggggcggtcaagagaagaccccgctgggatggaagcctccaccatgcccatatctgccttgccccgaacgagcagtgacccggtgttgctgaaggcccctgctcccctgggaactgttgccgacagtctcagggcctccgatgggcagcttcaagccaaggcaccaacgaagcccccccggacaccctccttcgaactgcctgatgcctctgaacgtcccccgacgtactgcgagctggtgccccgagtgcccagtgtccagggaacatccccgagccaaagctgcccagagccagaggccccatggtgggaggccgaggaggatgaggaggaagagaatagatgttttacaagaccacaggctgagatctctt

SEQ ID NO: 13961 - DNA, 6207 bp, Homo sapiens
actgcacaacaagatggcggcggcggcggcgagcggagctggcggggctgccggggccgggactgggggagccgggcccgcgggccgcctgctgcctccgcccgcgccggggtccccagccgcccccgctgccgtgtcccctgcggccggccagccgcgtcccccagccccggcctcccgcggacccatgcccgcccgtatcggctactacgagatcgaccgcaccatcggcaagggcaacttcgcggtggtcaagcgggccacgcacctcgtcaccaaggccaaggttgctatcaagatcatagataagacccagctggatgaagaaaacttgaagaagattttccgggaagttcaaattatgaagatgctttgccacccccatatcatcaggctctaccaggttatggagacagaacggatgatttatctggtgacagaatatgctagtggaggggaaatatttgaccacctggtggcccatggtagaatggcagaaaaggaggcacgtcggaagttcaaacagatcgtcacagctgtctatttttgtcactgtcggaacattgttcatcgtgatttaaaagctgaaaatttacttctggatgccaatctgaatatcaaaatagcagattttggtttcagtaacctcttcactcctgggcagctgctgaagacctggtgtggcagccctccctatgctgcacctgaactctttgaaggaaaagaatatgatgggcccaaagtggacatctggagccttggagttgtcctctacgtgcttgtgtgcggtgccctgccatttgatggaagcacactgcagaatctgcgggcccgcgtgctgagtggaaagttccgcatcccattttttatgtccacagaatgtgagcatttgatccgccatatgttggtgttagatcccaataagcgcctctccatggagcagatctgcaagcacaagtggatgaagctaggggacgccgatcccaactttgacaggttaatagctgaatgccaacaactaaaggaagaaagacaggtggaccccctgaatgaggatgtcctcttggccatggaggacatgggactggacaaagaacagacactgcagtcattaagatcagatgcctatgatcactatagtgcaatctacagcctgctgtgtgatcgacataagagacataaaaccctgcgtctcggagcacttcctagcatgccccgagccctggcctttcaagcaccagtcaatatccaggcggagcaggcaggtactgctatgaacatcagcgttccccaggtgcagctgatcaacccagagaaccaaattgtggagccggatgggacactgaatttggacagtgatgagggtgaagagccttcccctgaagcattggtgcgctatttgtcaatgaggaggcacacagtgggtgtggctgacccacgcacggaagttatggaagatctgcagaagctcctacctggctttcctggagtcaacccccaggctccattcctgcaggtggcccctaatgtgaacttcatgcacaacctgttgcctatgcaaaacttgcaaccaaccgggcaacttgagtacaaggagcagtctctcctacagccgcccacgctacagctgttgaatggaatgggcccccttggccggagggcatcagatggaggagccaacatccaactgcatgcccagcagctgctgaagcgcccacggggaccctctccgcttgtcaccatgacaccagcagtgccagcagttacccctgtggacgaggagagctcagacggggagccagaccaggaagctgtgcagagctctacctacaaggactccaacactctgcacctccctacggagcgtttctcccctgtgcgccggttctcagatggggctgcgagcatccaggccttcaaagctcacctggaaaaaatgggcaacaacagcagcatcaaacagctgcagcaggagtgtgagcagctgcagaagatgtacggggggcagattgatgaaagaaccctggagaagacccagcagcagcatatgttataccagcaggagcagcaccatcaaattctccagcaacaaattcaagactctatctgtcctcctcagccatctccacctcttcaggctgcatgtgaaaatcagccagccctccttacccatcagctccagaggttaaggattcagccttcaagcccaccccccaaccaccccaacaaccatctcttcaggcagcccagtaatagtcctccccccatgagcagtgccatgatccagcctcacggggctgcatcttcttcccagtttcaaggcttaccttcccgcagtgcaatctttcagcagcaacctgagaactgttcctctcctcccaacgtggcactaacctgcttgggtatgcagcagcctgctcagtcacagcaggtcaccatccaagtccaagagcctgttgacatgctcagcaacatgccaggcacagctgcaggctccagtgggcgcggcatctccatcagccccagtgctggtcagatgcagatgcagcaccgtaccaacctgatggccaccctcagctatgggcaccgtcccttgtccaagcagctgagtgctgacagtgcagaggctcacagcttgaacgtgaatcggttctcccctgctaactacgaccaggcgcatttacacccccatctgttttcggaccagtcccggggttcccccagcagctacagcccttcaacaggagtggggttctctccaacccaagccctgaaagtccctccacttgaccaattccccaccttccctcccagtgcacatcagcagccgccacactataccacgtcggcactacagcaggccctgctgtctcccacgccgccagactatacaagacaccagcaggtaccccacatccttcaaggactgctttctccccggcattcgctcaccggccactcggacatccggctgcccccaacagagtttgcacagctcattaaaaggcagcagcaacaacggcagcagcagcagcaacagcagcaacagcaagaataccaggaactgttcaggcacatgaaccaaggggatgcggggagtctggctcccagccttgggggacagagcatgacagagcgccaggctttatcttatcaaaatgctgactcttatcaccatcacaccagcccccagcatctgctacaaatcagggcacaagaatgtgtctcacaggcttcctcacccaccccgccccacgggtatgctcaccagccggcactgatgcattcagagagcatggaggaggactgctcgtgtgagggggccaaggatggcttccaagacagtaagagttcaagtacattgaccaaaggttgccatgacagccctctgctcttgagtaccggtggacctggggaccctgaatctttgctaggaactgtgagtcatgcccaagaattggggatacatccctatggtcatcagccaactgctgcattcagtaaaaataaggtgcccagcagagagcctgtcatagggaactgcatggatagaagttctccaggacaagcagtggagctgccggatcacaatgggctcgggtacccagcacgcccctccgtccatgagcaccacaggccccgggccctccagagacaccacacgatccagaacagcgacgatgcttatgtacagctggataacttgccaggaatgagtctcgtggctgggaaagcacttagctctgcccggatgtcggatgcagttctcagtcagtcttcgctcatgggcagccagcagtttcaggatggggaaaatgaggaatgtggggcaagcctgggaggtcatgagcacccagacctgagtgatggcagccagcatttaaactcctcttgctatccatctacgtgtattacagacattctgctcagctacaagcaccccgaagtctccttcagcatggagcaggcaggcgtgtaacaagaaacagagagttttgtgtacagcttgggaatgaaaaggttgattgtaaacccacagtatctagcagcgttgtgccaaattgcccttgtgtttctctccacccaaaatatcacagctgctttcctcacatttggttcatccgtgtgctgttcttttgggttctgagagggttttgccatgtttgcttgtatgaccaagtcaccaaggaaataaacaggaaggaaatccatgttctccatcttttgtgaaagtatatttgagttggtggttttttgttttgtttgggggtttgtgttttgttttgtttttggtatgttttcttccagaggtgatatactttcttttttttcttcctttcttttttttctttcgttccttttttgaaacaggagagcaaagcagttagagttcagaggccagcggcctcagggccactccctccctagccttcatcagcagagcaccctccatccccctgcattgctcttctgtgaaagcaaatactaaaggatgccatcctctggaatcctaatggcaggcaaagggagagaggaagggtgacggcttctggcacttagaaaacaaaaagaacaaaaaaagagaaacccccaagcctggaacgcagagaggtctttactgctgggatccacggaaaacatgtctgtcctagccaagatcatatgaagagtttggcacggaggctgagaatgacctggcatagatggtttgccagttaggatgtctcaatttgagcctttgcttttggtggataactcagctcccctcttgtaacctggaaagttggttgcctttatcatcctgctggttttatccatggactgaacacccaacagcagtgcactatgctttctatggcatctttcattctcattttatattgtgctataaaaaggattgtttctccatatatatattatatatgtgtgtatatatataatataatatatgtgtatatatatattatatatataatatataatataatatattatatatatattatatatataatatatatataaaatatatatatatatgctctcctctttcagcctctttgtcacagggaagaagtgtaggaggttgccttgggccctgcctctctcctaacctcctcttccccactgggtaccctcagcccctatattttaattcttgatcatgtagaaattgtttttggtaaatgttgatattattgttattatcattattaataaataaagagaaaaggaatttttgtttaaatgagaaatgtttaaccagattctgttctatttgaattgtgacttgcaccttttgttcaaagtatttcctttaggcattgtaattgtgaacagctcttacttgtgccagtgacagatgcagtggtctcctttccccagttgaagcagtgcatacgcagtagctattatttgtgttatctttatttctcttcattgttagaaaccaaagtcttctctgctggctggggctgagagagggtctgggttatctccttctgatcttcaaaacaagagagagaccttgaatacactgactcttccaccctttttttttctgggaaaggagagcaagaggtcccgagtcccctcctagtctttcatcctgaatttgcacagaggaaagcgggtgcccggcatggccatcctgatgttgctggcgggatccccatgcaccttgtccttctccactgatactggcagctcggctcctggacccaagatcccttgagtggaattctgcagtgcaagagcccttcgtgggagctgtcccatgtttccatggtccccagtctcccctccacttggtggggtcaccaactactcaccagaagggggcttaccaagaaagccctaaaaagctgttgacttatctgcgcttgttccaactcttatgcccccaacctgccctaccaccaccacgcgctcagcctgatgtgtttacatggtactgtatgtatgggagagcagactgcaccctccagcaacaacagatgaaagccagtgagcctactaaccgtgccatcttgcaaactacactttaaaaaaaactcattgctttgtattgtagtaaccaatatgtgcagtatacgttgaatgtatatgaacatactttcctatttctgttctttgaaaatgtcagaaatatttttttctttctcattttatgttgaactaaaaaggattaaaaaaaaaatctccaga

SEQ ID NO: 13962 - DNA, 3054 bp, Homo sapiens
taagacccagctggatgaagaaaacttgaagaagattttccgggaagttcaaattatgaagatgctttgccacccccatatcatcaggctctaccaggttatggagacagaacggatgatttatctggtgacagaatatgctagtggaggggaaatatttgaccacctggtggcccatggtagaatggcagaaaaggaggcacgtcggaagttcaaacagatcgtcacagctgtctatttttgtcactgtcggaacattgttcatcgtgatttaaaagctgaaaatttacttctggatgccaatctgaatatcaaaatagcagattttggtttcagtaacctcttcactcctgggcagctgctgaagacctggtgtggcagccctccctatgctgcacctgaactctttgaaggaaaagaatatgatgggcccaaagtggacatctggagccttggagttgtcctctacgtgcttgtgtgcggtgccctgccatttgatggaagcacactgcagaatctgcgggcccgcgtgctgagtggaaagttccgcatcccattttttatgtccacagaatgtgagcatttgatccgccatatgttggtgttagatcccaataagcgcctctccatggagcagatctgcaagcacaagtggatgaagctaggggacgccgatcccaactttgacaggttaatagctgaatgccaacaactaaaggaagaaagacaggtggaccccctgaatgaggatgtcctcttggccatggaggacatgggactggacaaagaacagacactgcagtcattaagatcagatgcctatgatcactatagtgcaatctacagcctgctgtgtgatcgacataagagacataaaaccctgcgtctcggagcacttcctagcatgccccgagccctggcctttcaagcaccagtcaatatccaggcggagcaggcaggtactgctatgaacatcagcgttccccaggtgcagctgatcaacccagagaaccaaattgtggagccggatgggacactgaatttggacagtgatgagggtgaagagccttcccctgaagcattggtgcgctatttgtcaatgaggaggcacacagtgggtgtggctgacccacgcacggaagttatggaagatctgcagaagctcctacctggctttcctggagtcaacccccaggctccattcctgcaggtggcccctaatgtgaacttcatgcacaacctgttgcctatgcaaaacttgcaaccaaccgggcaacttgagtacaaggagcagtctctcctacagccgcccacgctacagctgttgaatggaatgggcccccttggccggagggcatcagatggaggagccaacatccaactgcatgcccagcagctgctgaagcgcccacggggaccctctccgcttgtcaccatgacaccagcagtgccagcagttacccctgtggacgaggagagctcagacggggagccagaccaggaagctgtgcagaggtaatgtgacatctggcagtgcttgcagaagcccctgggcaggctcccctgcaaccagcgaaaggtcacctctgcccaaggaggtggtagagtgcagcttcaacatttgtgtggtctctttgctcaagccagatggcatgttccaccccacatggaagtaacagaagactacccagaaaatgtcatttctgtaagcaccattggaagtcccctaagtgacagcaataaccataagaactttttctttcctccctccttcttccttgtcccctgccttcatattgcaactctgatagtattcacaaggcacaaagcctgctcgtacctgccaagaactgtttactgaaaaggaattggagatgtgggatgacagtgatcctagctagtctggccatggacctctggcatggacttttcctttccaggagaatgaatacctcttgtactgtttgctgtgtgcttcttccacccccttgtaccaacaaagagatattgaaaaagagaatatgggattcgggccagggacagatgcaaatatccattgtttacagaaccttgttgagagatgcctaactcacagagaacggcagtgaccatcaggcatgctgtactgttcatttggcctcagttccgttagccctggtccttagctccatgcatgcccccttgtgggagttgattttcttattatccggggagggggtttcaccagaatccagcatgtattttcccagaaatacaggtgttcttcaagattatatgttttttcctttgagggaagttgaaataaaatggttttcatgggcttttggggaactttgggtgtctttatccaatggttattaaaacattaatggcttactctttggcaagttcacataacactgattactctacagtctgttaactgattttagctgaaaggggcaagatagttaagaatgaaatgagaccattttttaagaacctgccagttgctggctaggactctcatcctatccccagtagctctgtgtgagagctgctattcagaaagcagctggtcctatgtggaaagaaaaccatggcaaacaggggtgttggcaggtgggccagctccttctacagcttggccaatagaaggaaaattctggtaacttttttttttccttgatgctgttgtttctatagtttgctgataagagggtatataaggttacaaatgggccctactgggtcatgaagaaatgagaaatcaggaaatttactgcctttctaccttaaaagagacagcaatattttatcttctttgtcttagactttccttcctccaggtctaccttctttcttctttagaccaacatttcaagggtataatgcccatcagttttgatgtaataaaaaaggtgtagtgcctcttttattcatgcctccagaagagcagcagcggtggaggaagtcatccaccagacaaagagggacaatatcttattgatggtattaactaagtgctgggtctgaaagatcttccgaataaaagccatcagtttgggaactctt

SEQ ID NO: 13963 - DNA, 3816 bp, Homo sapiens
cgtcccccagccccggcctcccgcggacccatgcccgcccgtatcggctactacgagatcgaccgcaccatcggcaagggcaacttcgcggtggtcaagcgggccacgcacctcgtcaccaaggccaaggttgctatcaagatcatagataagacccagctggatgaagaaaacttgaagaagattttccgggaagttcaaattatgaagatgctttgccacccccatatcatcaggctctaccaggttatggagacagaacggatgatttatctggtgacagaatatgctagtggaggggaaatatttggaggatttggacatcagcaattctcattctgccccgagctgcctattgctgagtcctggagaagtgcagttaagagatgggggccccttcttctactcagcccccacttgtggaacttgatcagaccacctggtggcccatggtagaatggcagaaaaggaggcacgtcggaagttcaaacagatcgtcacagctgtctatttttgtcactgtcggaacattgttcatcgtgatttaaaagctgaaaatttacttctggatgccaatctgaatatcaaaatagcagattttggtttcagtaacctcttcactcctgggcagctgctgaagacctggtgtggcagccctccctatgctgcacctgaactctttgaaggaaaagaatatgatgggcccaaagtggacatctggagccttggagttgtcctctacgtgcttgtgtgcggtgccctgccatttgatggaagcacactgcagaatctgcgggcccgcgtgctgagtggaaagttccgcatcccattttttatgtccacagaatgtgagcatttgatccgccatatgttggtgttagatcccaataagcgcctctccatggagcagatctgcaagcacaagtggatgaagctaggggacgccgatcccaactttgacaggttaatagctgaatgccaacaactaaaggaagaaagacaggtggaccccctgaatgaggatgtcctcttggccatggaggacatgggactggacaaagaacagacactgcagtcattaagatcagatgcctatgatcactatagtgcaatctacagcctgctgtgtgatcgacataagagacataaaaccctgcgtctcggagcacttcctagcatgccccgagccctggcctttcaagcaccagtcaatatccaggcggagcaggcaggtactgctatgaacatcagcgttccccaggtgcagctgatcaacccagagaaccaaattgtggagccggatgggacactgaatttggacagtgatgagggtgaagagccttcccctgaagcattggtgcgctatttgtcaatgaggaggcacacagtgggtgtggctgacccacgcacggaagttatggaagatctgcagaagctcctacctggctttcctggagtcaacccccaggctccattcctgcaggtggcccctaatgtgaacttcatgcacaacctgttgcctatgcaaaacttgcaaccaaccgggcaacttgagtacaaggagcagtctctcctacagccgcccacgctacagctgttgaatggaatgggcccccttggccggagggcatcagatggaggagccaacatccaactgcatgcccagcagctgctgaagcgcccacggggaccctctccgcttgtcaccatgacaccagcagtgccagcagttacccctgtggacgaggagagctcagacggggagccagaccaggaagctgtgcagagctctacctacaaggactccaacactctgcacctccctacggagcgtttctcccctgtgcgccggttctcagatggggctgcgagcatccaggccttcaaagctcacctggaaaaaatgggcaacaacagcagcatcaaacagctgcagcaggagtgtgagcagctgcagaagatgtacggggggcagattgatgaaagaaccctggagaagacccagcagcagcatatgttataccagcaggagcagcaccatcaaattctccagcaacaaattcaagactctatctgtcctcctcagccatctccacctcttcaggctgcatgtgaaaatcagccagccctccttacccatcagctccagaggttaaggattcagccttcaagcccaccccccaaccaccccaacaaccatctcttcaggcagcccagtaatagtcctccccccatgagcagtgccatgatccagcctcacggggctgcatcttcttcccagtttcaaggcttaccttcccgcagtgcaatctttcagcagcaacctgagaactgttcctctcctcccaacgtggcactaacctgcttgggtatgcagcagcctgctcagtcacagcaggtcaccatccaagtccaagagcctgttgacatgctcagcaacatgccaggcacagctgcaggctccagtgggcgcggcatctccatcagccccagtgctggtcagatgcagatgcagcaccgtaccaacctgatggccaccctcagctatgggcaccgtcccttgtccaagcagctgagtgctgacagtgcagaggctcacagtgcacatcagcagccgccacactataccacgtcggcactacagcaggccctgctgtctcccacgccgccagactatacaagacaccagcaggtaccccacatccttcaaggactgctttctccccggcattcgctcaccggccactcggacatccggctgcccccaacagagtttgcacagctcattaaaaggcagcagcaacaacggcagcagcagcagcaacagcagcaacagcaagaataccaggaactgttcaggcacatgaaccaaggggatgcggggagtctggctcccagccttgggggacagagcatgacagagcgccaggctttatcttatcaaaatgctgactcttatcaccatcacaccagcccccagcatctgctacaaatcagggcacaagaatgtgtctcacaggcttcctcacccaccccgccccacgggtatgctcaccagccggcactgatgcattcagagagcatggaggaggactgctcgtgtgagggggccaaggatggcttccaagacagtaagagttcaagtacattgaccaaaggttgccatgacagccctctgctcttgagtaccggtggacctggggaccctgaatctttgctaggaactgtgagtcatgcccaagaattggggatacatccctatggtcatcagccaactgctgcattcagtaaaaataaggtgcccagcagagagcctgtcatagggaactgcatggatagaagttctccaggacaagcagtggagctgccggatcacaatgggctcgggtacccagcacgcccctccgtccatgagcaccacaggccccgggccctccagagacaccacacgatccagaacagcgacgatgcttatgtacagctggataacttgccaggaatgagtctcgtggctgggaaagcacttagctctgcccggatgtcggatgcagttctcagtcagtcttcgctcatgggcagccagcagtttcaggatggggaaaatgaggaatgtggggcaagcctgggaggtcatgagcacccagacctgagtgatggcagccagcatttaaactcctcttgctatccatctacgtgtattacagacattctgctcagctacaagcaccccgaagtctccttcagcatggagcaggcaggcgtgtaacaagaaacagagagttttgtgtacagcttgggaatgaaaaggttgattgt

SEQ ID NO: 13964 - DNA, 6331 bp, Homo sapiens
cggagctggcggggctgccggggccgggactgggggagccgggcccgcgggccgcctgctgcctccgcccgcgccggggtccccagccgcccccgctgccgtgtcccctgcggccggccagccgcgtcccccagccccggcctcccgcggacccatgcccgcccgtatcggctactacgagatcgaccgcaccatcggcaagggcaacttcgcggtggtcaagcgggccacgcacctcgtcaccaaggccaaggttgctatcaagatcatagataagacccagctggatgaagaaaacttgaagaagattttccgggaagttcaaattatgaagatgctttgccacccccatatcatcaggctctaccaggttatggagacagaacggatgatttatctggtgacagaatatgctagtggaggggaaatatttgaccacctggtggcccatggtagaatggcagaaaaggaggcacgtcggaagttcaaacagatcgtcacagctgtctatttttgtcactgtcggaacattgttcatcgtgatttaaaagctgaaaatttacttctggatgccaatctgaatatcaaaatagcagattttggtttcagtaacctcttcactcctgggcagctgctgaagacctggtgtggcagccctccctatgctgcacctgaactctttgaaggaaaagaatatgatgggcccaaagtggacatctggagccttggagttgtcctctacgtgcttgtgtgcggtgccctgccatttgatggaagcacactgcagaatctgcgggcccgcgtgctgagtggaaagttccgcatcccattttttatgtccacagaatgtgagcatttgatccgccatatgttggtgttagatcccaataagcgcctctccatggagcagatctgcaagcacaagtggatgaagctaggggacgccgatcccaactttgacaggttaatagctgaatgccaacaactaaaggaagaaagacaggtggaccccctgaatgaggatgtcctcttggccatggaggacatgggactggacaaagaacagacactgcagtcattaagatcagatgcctatgatcactatagtgcaatctacagcctgctgtgtgatcgacataagagacataaaaccctgcgtctcggagcacttcctagcatgccccgagccctggcctttcaagcaccagtcaatatccaggcggagcaggcaggtactgctatgaacatcagcgttccccaggtgcagctgatcaacccagagaaccaaattgtggagccggatgggacactgaatttggacagtgatgagggtgaagagccttcccctgaagcattggtgcgctatttgtcaatgaggaggcacacagtgggtgtggctgacccacgcacggaagttatggaagatctgcagaagctcctacctggctttcctggagtcaacccccaggctccattcctgcaggtggcccctaatgtgaacttcatgcacaacctgttgcctatgcaaaacttgcaaccaaccgggcaacttgagtacaaggagcagtctctcctacagccgcccacgctacagctgttgaatggaatgggcccccttggccggagggcatcagatggaggagccaacatccaactgcatgcccagcagctgctgaagcgcccacggggaccctctccgcttgtcaccatgacaccagcagtgccagcagttacccctgtggacgaggagagctcagacggggagccagaccaggaagctgtgcagaggtacttggcaaataggtccaaaagacatacactggccatgaccaaccctacagctgagatcccaccggacctacaacggcagctaggacagcagcctttccgttcccgggtctggcctcctcacctggtacctgatcagcatcgctctacctacaaggactccaacactctgcacctccctacggagcgtttctcccctgtgcgccggttctcagatggggctgcgagcatccaggccttcaaagctcacctggaaaaaatgggcaacaacagcagcatcaaacagctgcagcaggagtgtgagcagctgcagaagatgtacggggggcagattgatgaaagaaccctggagaagacccagcagcagcatatgttataccagcaggagcagcaccatcaaattctccagcaacaaattcaagactctatctgtcctcctcagccatctccacctcttcaggctgcatgtgaaaatcagccagccctccttacccatcagctccagaggttaaggattcagccttcaagcccaccccccaaccaccccaacaaccatctcttcaggcagcccagtaatagtcctccccccatgagcagtgccatgatccagcctcacggggctgcatcttcttcccagtttcaaggcttaccttcccgcagtgcaatctttcagcagcaacctgagaactgttcctctcctcccaacgtggcactaacctgcttgggtatgcagcagcctgctcagtcacagcaggtcaccatccaagtccaagagcctgttgacatgctcagcaacatgccaggcacagctgcaggctccagtgggcgcggcatctccatcagccccagtgctggtcagatgcagatgcagcaccgtaccaacctgatggccaccctcagctatgggcaccgtcccttgtccaagcagctgagtgctgacagtgcagaggctcacagcttgaacgtgaatcggttctcccctgctaactacgaccaggcgcatttacacccccatctgttttcggaccagtcccggggttcccccagcagctacagcccttcaacaggagtggggttctctccaacccaagccctgaaagtccctccacttgaccaattccccaccttccctcccagtgcacatcagcagccgccacactataccacgtcggcactacagcaggccctgctgtctcccacgccgccagactatacaagacaccagcaggtaccccacatccttcaaggactgctttctccccggcattcgctcaccggccactcggacatccggctgcccccaacagagtttgcacagctcattaaaaggcagcagcaacaacggcagcagcagcagcaacagcagcaacagcaagaataccaggaactgttcaggcacatgaaccaaggggatgcggggagtctggctcccagccttgggggacagagcatgacagagcgccaggctttatcttatcaaaatgctgactcttatcaccatcacaccagcccccagcatctgctacaaatcagggcacaagaatgtgtctcacaggcttcctcacccaccccgccccacgggtatgctcaccagccggcactgatgcattcagagagcatggaggaggactgctcgtgtgagggggccaaggatggcttccaagacagtaagagttcaagtacattgaccaaaggttgccatgacagccctctgctcttgagtaccggtggacctggggaccctgaatctttgctaggaactgtgagtcatgcccaagaattggggatacatccctatggtcatcagccaactgctgcattcagtaaaaataaggtgcccagcagagagcctgtcatagggaactgcatggatagaagttctccaggacaagcagtggagctgccggatcacaatgggctcgggtacccagcacgcccctccgtccatgagcaccacaggccccgggccctccagagacaccacacgatccagaacagcgacgatgcttatgtacagctggataacttgccaggaatgagtctcgtggctgggaaagcacttagctctgcccggatgtcggatgcagttctcagtcagtcttcgctcatgggcagccagcagtttcaggatggggaaaatgaggaatgtggggcaagcctgggaggtcatgagcacccagacctgagtgatggcagccagcatttaaactcctcttgctatccatctacgtgtattacagacattctgctcagctacaagcaccccgaagtctccttcagcatggagcaggcaggcgtgtaacaagaaacagagagttttgtgtacagcttgggaatgaaaaggttgattgtaaacccacagtatctagcagcgttgtgccaaattgcccttgtgtttctctccacccaaaatatcacagctgctttcctcacatttggttcatccgtgtgctgttcttttgggttctgagagggttttgccatgtttgcttgtatgaccaagtcaccaaggaaataaacaggaaggaaatccatgttctccatcttttgtgaaagtatatttgagttggtggttttttgttttgtttgggggtttgtgttttgttttgtttttggtatgttttcttccagaggtgatatactttcttttttttcttcctttcttttttttctttcgttccttttttgaaacaggagagcaaagcagttagagttcagaggccagcggcctcagggccactccctccctagccttcatcagcagagcaccctccatccccctgcattgctcttctgtgaaagcaaatactaaaggatgccatcctctggaatcctaatggcaggcaaagggagagaggaagggtgacggcttctggcacttagaaaacaaaaagaacaaaaaaagagaaacccccaagcctggaacgcagagaggtctttactgctgggatccacggaaaacatgtctgtcctagccaagatcatatgaagagtttggcacggaggctgagaatgacctggcatagatggtttgccagttaggatgtctcaatttgagcctttgcttttggtggataactcagctcccctcttgtaacctggaaagttggttgcctttatcatcctgctggttttatccatggactgaacacccaacagcagtgcactatgctttctatggcatctttcattctcattttatattgtgctataaaaaggattgtttctccatatatatattatatatgtgtgtatatatataatataatatatgtgtatatatatattatatatataatatataatataatatattatatatatattatatatataatatatatataaaatatatatatatatgctctcctctttcagcctctttgtcacagggaagaagtgtaggaggttgccttgggccctgcctctctcctaacctcctcttccccactgggtaccctcagcccctatattttaattcttgatcatgtagaaattgtttttggtaaatgttgatattattgttattatcattattaataaataaagagaaaaggaatttttgtttaaatgagaaatgtttaaccagattctgttctatttgaattgtgacttgcaccttttgttcaaagtatttcctttaggcattgtaattgtgaacagctcttacttgtgccagtgacagatgcagtggtctcctttccccagttgaagcagtgcatacgcagtagctattatttgtgttatctttatttctcttcattgttagaaaccaaagtcttctctgctggctggggctgagagagggtctgggttatctccttctgatcttcaaaacaagagagagaccttgaatacactgactcttccaccctttttttttctgggaaaggagagcaagaggtcccgagtcccctcctagtctttcatcctgaatttgcacagaggaaagcgggtgcccggcatggccatcctgatgttgctggcgggatccccatgcaccttgtccttctccactgatactggcagctcggctcctggacccaagatcccttgagtggaattctgcagtgcaagagcccttcgtgggagctgtcccatgtttccatggtccccagtctcccctccacttggtggggtcaccaactactcaccagaagggggcttaccaagaaagccctaaaaagctgttgacttatctgcgcttgttccaactcttatgcccccaacctgccctaccaccaccacgcgctcagcctgatgtgtttacatggtactgtatgtatgggagagcagactgcaccctccagcaacaacagatgaaagccagtgagcctactaaccgtgccatcttgcaaactacactttaaaaaaaactcattgctttgtattgtagtaaccaatatgtgcagtatacgttgaatgtatatgaacatactttcctatttctgttctttgaaaatgtcagaaatatttttttctttctcattttatgttgaactaaaaaggattaaaaaaaaaatctccagactcaagttgctaa

SEQ ID NO: 13965 - DNA, 3858 bp, Homo sapiens
ggaggtttcactgcacaacaagatggcggcggcggcggcgagcggagctggcggggctgccggggccgggactgggggagccgggcccgcgggccgcctgctgcctccgcccgcgccggggtccccagccgcccccgctgccgtgtcccctgcggccggccagccgcgtcccccagccccggcctcccgcggacccatgcccgcccgtatcggctactacgagatcgaccgcaccatcggcaagggcaacttcgcggtggtcaagcgggccacgcacctcgtcaccaaggccaaggttgctatcaagatcatagataagacccagctggatgaagaaaacttgaagaagattttccgggaagttcaaattatgaagatgctttgccacccccatatcatcaggctctaccaggttatggagacagaacggatgatttatctggtgacagaatatgctagtggaggggaaatatttgaccacctggtggcccatggtagaatggcagaaaaggaggcacgtcggaagttcaaacagatcgtcacagctgtctatttttgtcactgtcggaacattgttcatcgtgatttaaaagctgaaaatttacttctggatgccaatctgaatatcaaaatagcagattttggtttcagtaacctcttcactcctgggcagctgctgaagacctggtgtggcagccctccctatgctgcacctgaactctttgaaggaaaagaatatgatgggcccaaagtggacatctggagccttggagttgtcctctacgtgcttgtgtgcggtgccctgccatttgatggaagcacactgcagaatctgcgggcccgcgtgctgagtggaaagttccgcatcccattttttatgtccacagaatgtgagcatttgatccgccatatgttggtgttagatcccaataagcgcctctccatggagcagatctgcaagcacaagtggatgaagctaggggacgccgatcccaactttgacaggttaatagctgaatgccaacaactaaaggaagaaagacaggtggaccccctgaatgaggatgtcctcttggccatggaggacatgggactggacaaagaacagacactgcaggcggagcaggcaggtactgctatgaacatcagcgttccccaggtgcagctgatcaacccagagaaccaaattgtggagccggatgggacactgaatttggacagtgatgagggtgaagagccttcccctgaagcattggtgcgctatttgtcaatgaggaggcacacagtgggtgtggctgacccacgcacggaagttatggaagatctgcagaagctcctacctggctttcctggagtcaacccccaggctccattcctgcaggtggcccctaatgtgaacttcatgcacaacctgttgcctatgcaaaacttgcaaccaaccgggcaacttgagtacaaggagcagtctctcctacagccgcccacgctacagctgttgaatggaatgggcccccttggccggagggcatcagatggaggagccaacatccaactgcatgcccagcagctgctgaagcgcccacggggaccctctccgcttgtcaccatgacaccagcagtgccagcagttacccctgtggacgaggagagctcagacggggagccagaccaggaagctgtgcagaggtacttggcaaataggtccaaaagacatacactggccatgaccaaccctacagctgagatcccaccggacctacaacggcagctaggacagcagcctttccgttcccgggtctggcctcctcacctggtacctgatcagcatcgctctacctacaaggactccaacactctgcacctccctacggagcgtttctcccctgtgcgccggttctcagatggggctgcgagcatccaggccttcaaagctcacctggaaaaaatgggcaacaacagcagcatcaaacagctgcagcaggagtgtgagcagctgcagaagatgtacggggggcagattgatgaaagaaccctggagaagacccagcagcagcatatgttataccagcaggagcagcaccatcaaattctccagcaacaaattcaagactctatctgtcctcctcagccatctccacctcttcaggctgcatgtgaaaatcagccagccctccttacccatcagctccagaggttaaggattcagccttcaagcccaccccccaaccaccccaacaaccatctcttcaggcagcccagtaatagtcctccccccatgagcagtgccatgatccagcctcacggggctgcatcttcttcccagtttcaaggcttaccttcccgcagtgcaatctttcagcagcaacctgagaactgttcctctcctcccaacgtggcactaacctgcttgggtatgcagcagcctgctcagtcacagcaggtcaccatccaagtccaagagcctgttgacatgctcagcaacatgccaggcacagctgcaggctccagtgggcgcggcatctccatcagccccagtgctggtcagatgcagatgcagcaccgtaccaacctgatggccaccctcagctatgggcaccgtcccttgtccaagcagctgagtgctgacagtgcagaggctcacagtgcacatcagcagccgccacactataccacgtcggcactacagcaggccctgctgtctcccacgccgccagactatacaagacaccagcaggtaccccacatccttcaaggactgctttctccccggcattcgctcaccggccactcggacatccggctgcccccaacagagtttgcacagctcattaaaaggcagcagcaacaacggcagcagcagcagcaacagcagcaacagcaagaataccaggaactgttcaggcacatgaaccaaggggatgcggggagtctggctcccagccttgggggacagagcatgacagagcgccaggctttatcttatcaaaatgctgactcttatcaccatcacaccagcccccagcatctgctacaaatcagggcacaagaatgtgtctcacaggcttcctcacccaccccgccccacgggtatgctcaccagccggcactgatgcattcagagagcatggaggaggactgctcgtgtgagggggccaaggatggcttccaagacagtaagagttcaagtacattgaccaaaggttgccatgacagccctctgctcttgagtaccggtggacctggggaccctgaatctttgctaggaactgtgagtcatgcccaagaattggggatacatccctatggtcatcagccaactgctgcattcagtaaaaataaggtgcccagcagagagcctgtcatagggaactgcatggatagaagttctccaggacaagcagtggagctgccggatcacaatgggctcgggtacccagcacgcccctccgtccatgagcaccacaggccccgggccctccagagacaccacacgatccagaacagcgacgatgcttatgtacagctggataacttgccaggaatgagtctcgtggctgggaaagcacttagctctgcccggatgtcggatgcagttctcagtcagtcttcgctcatgggcagccagcagtttcaggatggggaaaatgaggaatgtggggcaagcctgggaggtcatgagcacccagacctgagtgatggcagccagcatttaaactcctcttgctatccatctacgtgtattacagacattctgctcagctacaagcaccccgaagtctccttcagcatggagcaggcaggcgtgtaacaagaaacagagagttttgtgtacagcttgggaatgaaaaggttgattgt

SEQ ID NO: 13966 - DNA, 3955 bp, Homo sapiens
gaacagcgacgatgcttatgtatgttggtcccacctgctgcacagaggtggatcctcccagtcccagccttgaaacagagtatagtgatgtggggtagcctctcttggccgctctcctcagtcagcattcagcctttctggaaacggtggggagcatttctttttttttcttttttgagatggagtctcactctgtcgcccaggcgggaggacagtggcgcgatatcagctcactgcaacttctacctccccagttcaagtgacttttgtgcctcagcttcctgagtagctgggactacaggtgcctgccaccacacctggctaatttttgtatttttagtaggcatggggttttaccatgttggctaggctggtctcgaattcctgagctcaggcaattcgcctaccttaagagcattttctttgagtcaccctaacagaccaaaccttaattcaagtagaatctatgctccaaattttagaccaaagaatcagaaatagttgccatctgttccctgtagttttggttattaaacctcttctcagtctaaactcaggccccagcaaatgagcccataggcttctggttatttttcagcagctacattgagcttactcagatcaggggagctggtgggcctcagcaaagttttgttttcctagggtggtgctagtctagtagctagccacatgtggctattcaaatctaaaccaattaaaattaaaaacaatttaaaattcagttcctcagtcacaccagttacactttattttttattattattattttttgagacagagtcttgctctgtcacccaggttggagtgcagtggcgcaatctcggctcactgcaagctccgcctcccgggttcacgccattctcctgcctcaacctcccgagtagctgggactacaggcgcccgccacccttttttgtatttttagtagagctaaatttttttagcccagctaatttttcgtatttttagtagagacggggtttcaccgtgttagccaggatggtctcgatctcctgacctcatgatccaccagcctcagcctcccaaagtgctgggattacaggcatgagccaccgtgcccagcccagtcacactttaagtgctcagtagccacttgtggctactggttaccatattggacaggacagagaacatttccatcactgcagagtgtgactggacggtgctgtcctaagacaaagtcccagtggagatggggataggtcagaaacctggttttagaaggccatgtaggtatcaagatgtcaccaccagctgagatttgccacatccgccccaccctcagcccccccactgggcagagccaagcagcttcccacactgtcgctgtggagcaccccctttgggtggtgctttagaggaaggagtctggagtggggccccgggctgtcttttgcctgggctccttcagaaggaccagctgtctctaggggttgcctgagagtggtgtcttgtgtgcttatttcttctcttaactgttttctgcaggtacagctggataacttgccaggaatgagtctcgtggctgggaaagcacttagctctgcccggatgtcggatgcagttctcagtcagtcttcgctcatgggcagccagcagtttcaggatggggaaaatgagggtgaggagccttatgcatggggcactccagagaagttcctggaggggcctccctccatcttccgtaactgctcctctcttcgtaggaagagctcatggggaggtagagccacagcatcccacaggttctggacacagcccctttccccactggtcttccctgagtgtgggtgtgtaaaggaggtgtggcttctggccagatggcacagggctctcccattcctgtctctcatctctgtgatgatatgccttcaatcactttttccagttctgcttagagggcatcaggtcctaatggcacatttctacctcttcttggagccagtcaagggagggtgtcataacaaataataggcgtaggccttgggcggggcaggtctgccaccagtcccaaggctgtccttttcaggctctgcaggtgaggcacttggctttctggaccccgagatcctcatctgtaaagtggcaaaaacgatagagcctttatcctacattgtgccctgagggctggctggcttagtgagtatcaagtgcttagcacagtgtctggaagacagacagtgcccaggaatgggtgcctgcaggcagtaaaattattctccctttcactctttaagaggtgatcctttctgaaggagtcctctatcttctctcacactacagtagttgatcttacctaaggatgggaaagggtaaaggaaaagggaaaaaagcagaacaggtagaggagaatataggaagaatcttggcccccgcccatcgtcactcaacaccttgagggcctgctgtgagctagaattcagggctgggagtcaggctgtgggatgctcgacaggttgccttcaattcctcctctctctcccccttgctctcctagtcccccagttccctgccaacctcatacgttctttttggtcttgcagaatgtggggcaagcctgggaggtcatgagcacccagacctgagtgatggcagccagcatttaaactcctcttgctatccatctacgtgtattacagacattctgctcagctacaagcaccccgaagtctccttcagcatggagcaggcaggcgtgtaacaagaaacagagagtgagtgtcaccctggccagagccaaaccagccctgtggcccagtgcctgctcccaatcccatcaggagcttcagcccatgtgttgtggtggccagtgcagtcgacagtaccacgcctcccctcgtggccttcacagtttcttgcttttcattaacgacgctgctagttttagggcgcgaggtaggggtgggggtgtgcagaagaaatgctaaacacagtctcttggttcggttatgggaataagacacaagactcgccgtgtgttacaggtgctctagccttcatagcgacagaagtgagctacggctccagaggatgcaggtgacctccggtcagcataatgaggaaaggaggaagtccttaaactcagtcctaaaagacaaaacctggcaggaaaatatgtccagccatattttttaaggccatacagaagcaagtggcaggatattccagattagggaaatgtgtgatgagaggcccatggtagaaagaatggggaaattggcttgtttggctggagtaatgcaaagagtacacagcaggcaccattggttgtatctggaaaatccttgacagaagaggcctgatgaaagggaagccacttggcaaatccacatcagagcctcagtatggcaagctacctgaacacctgagggaaagtaaacccgttgcattttttaaaaggttttaaatggaatatttgagcctttctcttttcaaactaattctcctctgtgtctgctttattccaggttttgtgtacagcttgggaatgaaaaggttgattgtaaacccacagtatctagcagcgttgtgccaaattgcccttgtgtttctctccacccaaaatatcacagctgctttcctcacatttggttcatccgtgtgctgttcttttgggttctgagagggttttgccatgtttgcttgtatgaccaagtcaccaaggaaataaacaggaaggaaatccatgttctccatcttttgtgaaagtatatttgagttggtggttttttgttttgtttgggggtttgtgttttgttttgtttttggtatgttttcttccagaggtgatatactttcttttttttcttcctttcttttttttctttcgttccttttttgaaacaggagagcaaagcagttagagttcagaggccagcggcctcagggccactccctccctagccttcatcag

SEQ ID NO: 13967 - DNA, 294 bp, Homo sapiens
gaacagcgacgatgcttatgtacagctggataacttgccaggaatgagtctcgtggctgggaaagcacttagctctgcccggatgtcggatgcagttctcagtcagtcttcgctcatgggcagccagcagtttcaggatggggaaaatgaggacattctgctcagctacaagcaccccgaagtctccttcagcatggagcaggcaggcgtgtaacaagaaacagagagagagcaaagcagttagagttcagaggccagcggcctcagggccactccctccctagccttcatcag

SEQ ID NO: 13968 - DNA, 19657 bp, Homo sapiens
aattcatttgttttttgtgttgctgaaccaaatacatgttcgtgctcatttcattagctcactgctgggtcaagcctcaggtagagtctgaaacaaaagccatcattagcaaagacagggtaaaaggctttcacctgctgccagaactctctggatacctctgcacggtcattagattcctcctggtcccgcgctgtctgcattgtatttgaactcgcttgttaacctgcttcctgagctgtggttctgcttcagtcccaaatgaatcactggcaaggtagcacatcatttcatccaaagttcagtgtaatggcatctctgccctggacatgaaaccctgatcctttccatctgctactggaatgctgctgccttggcagtcttttatctgcttacctcagcccataaacatctctttctgatcatcaggtcacaagagtaggtgttagcttctaaccccgatgctgtcttaggcattccttatcaatagcttgttctttctttctgtaagattctggctgtgttccagttgagcagtggggtctttgaaggtaatccatatgattcctctttcattaggaggttgggtgagtgctgctgctctgagaagttgattttcacagtaggtgaccttatttgttgaccaggtacgtgcaggatctcaaggcccacattccttaagaatttgttgtctccatcccaggatcagaagtcttcattttcccccaccccaatcgccaccttctattttctgtcacagaacctatgagttctaggccagacctttgaccacaaaactgactgttgtttccctctggccatacggagatcattgctcagggaaaactttggctcaaatggtgaatttaaggtttctaaaggcactagatagacatatgattataaaagcaagagcttctgtacagtctggcctggaggatattgagaagcttttctctctggcctagtgtatttataagaactggatgtacttgatctcgggacctcaccaggcttggaaagtaagccaaccgaaggtaagtagaaatggaagatgtacacctggagccctctaaagggaagcaggctagggaaacgactgatgtctggaaatggcatgaaagtggcataatatgcagggctacctgggcagccagccgtctttatgttcatctggaacagcagtccctgtgtgatttggtcaaagcccctgagtcctagcctctaaccttctcttcccatatattcagctctacctacaaggactccaacactctgcacctccctacggagcgtttctcccctgtgcgccggttctcagatggggctgcgagcatccaggccttcaaagctcacctggaaaaaatgggcaacaacagcagcatcaaacagctgcagcaggtaatggaagaggtggcaggcatccctggaggagcatgggtgacagaggccaggattgcaggaggactggggtggtaaacgtaccccttttatgtcagcaacattgcagttttataggttaaaaaagtatagctttctgggccgggcgcagtggatcccgcctataatcccagcactttgggaggccaacgtgggaggattgcttgagccctgaagttctagaccagcctaggcaacgtggcaaaccctttctcccccaaaagattaaaaattagcatagtcccagctactcctgaggctgagatgggaggatcacttgaacctgggaggtagaggttgtagtaagctaagatcacacccctgcactccatcctggcaacagaacgagactctgtcttaaaagaaaaagaaagtatagctttctaatgcactttctttactttgtgttatgtacagccctccccaggatcaaacttccttcccctgtgaagggactaaatttttctcctgtctctagttcattggaaaggaatttctgggcttgggtttctgtgggaaccaccagagaaggtgctactttttttttttttttttgagaccaagtcttgctctgtcacccaggctggagtgcagtggcacaatctcagctcactgcatcgtccgcctcctgggttctagagattctcctgcctcagcatcctgggtagctgggactacaggcgtgcaccaccatgccagctaatttttgtatttttagtagagacagggtttcaccatgttgaccaggctatgtctcgaacttctgacctcaggtgatccgcccgtctcggcctcccaaagtgctaggattacaggcgtgagccaccttgcgcgcctggcactctgcgcatgatttaggatgctgggtcttgattaaacctgctgtacattgttaccacctggcattctctccaggtggtatggaacggcactctcagaggaaggaaatgtacctctatatgtttctgtactataaagattctataaagagccaatttcctttctgccttcctgatgaccaagcttccaatggcgtgtgctttgtacacagatttcacattggacacttgtactcatacaaaggccatccttgatgttttccattcattcatacagaacaggatgtgaatctatttagtgcaccagatacttaggtaaatgagttaattgctcatcaaggacactgttctcttgcggctctttctgcccatgagagcttggaggcagatctgcatctgctgaaatcactgcatgaggcgggtctggctgcatcccatctgtattaactactttcccttcaggagtgtgagcagctgcagaagatgtacggggggcagattgatgaaagaaccctggagaagacccagcagcagcatatgttataccagcaggagcagcaccatcaaattctccagcaacaaattcaagtaggccctcactctttgctttctccaacttgtttggagtttgctttcaggctgatttgcctgtgcattttggaggagaccactcagtgcaaagtggatttgaggtctgtttatggttgacatgtttgagtaaaggtaatcagaccttctggtgaacaacaaaagcataaatctgagacacagatagttctttctgtttcttcccttcctgagaatagctctgagtaatcttcaagctcacaataatttttttcctttccccatatatgttttaggactctatctgtcctcctcagccatctccacctcttcaggctgcatgtgaaaatcagccagccctccttacccatcagctccagaggtatgagtcattttgtgttgtgcctaagccattgtctcgatagcctggtacccttggcttgactcactgggagatatggactgacttgagcattcatcttgcaagaatctatttgaaaaggagagaaaccactgtaaatttcaggagccttcttgaaatcccaacttcctgtgccacttcatttccttagccccatgagcaaagtaatctgatatctaatacaggagccagacataggcccacaatgaactctgccattttggctgagttcttttcaaacaagatgtagataggttttaaatacactgtggtggatggcttatgtatatttttctaacatgaggcttatcaaagtaaaaaaaaatagtttccactgatatatgttgtatggctgaaacttaagattgtactgtcaccttaggaagcttctttgtgtatctcttttgttatttttaaggttaaggattcagccttcaagcccaccccccaaccaccccaacaaccatctcttcaggcagcccagtaatagtcctccccccatgagcagtgccatgatccagcctcacggtgagtggagaggttcagaccaaacagttcattttatgccacatgggaaaaaatgatggtctcagttttgagcaccataaaccatttgaaaggcagaataacatagtattcaggggtatggactctagagccaagctgctttggtttgcatcctggttccatcagtttcttagctgtaaacccttgggtaagttaacttgacttcttgaattagtccatttcacactgctctaaagaactgactgagactgggtaattgataaaggaaagaggtttaattgactcacagttccacatggctggggaggcctcagaaaacttacaaccatggcagaaggagaagcaaggctcatcttccatggtggcaggagagagattgcacaggggaaagcgccagaaacttatcagacaaccagatctcaagaattccctcattatcatgagaacagcatggaggaaactgccccgtgatccagtcgcctcccaccaggtccctcccttgacacatggggactacacttcaagatgtgggtacacacagagccaaaccatattacttctcaaatgtcaactgaggataattatggtacagtatgtagatatacgtaaaacacttggaacagtctctggcacaaaatagttctcaataaaggtttactattattaatatttttaacaaaacctccagccctaccaaataaaaagcagctaccagaaccttccttatagacatgcctccgtttggctgtctactatacacgtgggcccctctcttgtgggtgtacagatgggagtgaagataagtataatgtgactgtgagtcttcagaggtcagccgtcttaggatctcttgagtaacactccacgagctacgtccctagtcagtctccctaggatccttgagaagagtctgaattggcctctaggctcttcctacttaaagtggggtcccccagccaccaatattgggagaaaaagtaagatctcaggtcgtattccagacctgttagagtctgttttttttttttttgagatggagtctccccctgtcacccaggctggagtgcagtggtatgatctcggctcactgcaacctccacctccgggttcaaatgattctcctgcctcagcctcccaagtagctgggattacaggcgcccgccaccacacccagctaatttttgtatttttagtagagacagggtttcgccatggtggccaggctggtctcgaactcctgacctcatgatccgcccacctcggcctcccaagtgctgggattacaggtgtgagccaccacgcccggcctagagtctgcatttttaaccagatgccaggccatttgtgtgcatgtgaaagttcaagaagcactgcctagatccgagttaccccatgtaatccatggaccagcttttaagggaacttgttggaaacacaaattcttaggggcccatcctgacctactgaatcagagtttgaaacagaattatatagataggacccaggaatcttctgtttaacaagttctccagacttgtcctatgctcagtgcagtttgagaagcactgttctagctggtatgtcgtctgagtattctcattagctctcattacttctggctggctggtggcctgggcacttggtcactctgaggttcctttctctccaggggctgcatcttcttcccagtttcaaggcttaccttcccgcagtgcaatctttcagcagcaacctgagaactgttcctctcctcccaacgtggcactaacctgcttgggtatgcagcagcctgctcagtcacagcaggtcaccatccaagtccaagagcctgttgacatgctcagcaacatgccaggcacagctgcaggctccagtgggcgcggcatctccatcagccccagtgctggtcagatgcagatgcagcaccgtaccaacctgatggccaccctcagctatgggcaccgtcccttgtccaagcagctgagtgctgacagtgcagaggctcacaggtaagaccgcctaacgtcacccagccatctatgcatgggatccaggtgggaggaagccccttagcagagtgagagaaaaggagggaaggagaatgggtctgactaggctgtgctcttgtttcacgctttctaaaatcaggatgctgggtttggaatgaacttgtcagctttttattgacccagggttaaaattctaatgagactgaggtggaaaatgggaaagctaccttattatttgctaccttattatttgcttgcaaagaagaaaatggcctgttagaggaatgtataaaaattccagttccccttttcttgaagggagcatcttgaagttgcttccttcaaaatgagctagatctattacccacgcagtgccctcagtcccttggaggttactggacaagccagtaatggaataaatagggacaatgcatacatctgccacttctctgtcacaccacagttctctgtaccagtgggttctccctactgaggaggaggagctgttcccaggaagtctagtacttgttacatggatgtctggtactcccttttgtgtctgcagcttgaacgtgaatcggttctcccctgctaactacgaccaggcgcatttacacccccatctgttttcggaccagtcccggggttcccccagcagctacagcccttcaacaggagtggggttctctccaacccaagccctgaaagtccctccacttgaccaattccccaccttccctcccagtgcacatcagcagccgccacactataccacgtcggcactacagcaggccctgctgtctcccacgccgccagactatacaagacaccagcaggtaccccacatccttcaaggactgctttctccccggcattcgctcaccggccactcggacatccggctgcccccaacagagtttgcacagctcattaaaaggcagcagcaacaacggcagcagcagcagcaacagcagcaacagcaagaataccaggaactgttcaggcacatgaaccaaggggatgcggggagtctggctcccagccttgggggacagagcatgacagagcgccaggctttatcttatcaaaatgctgactcttatcaccatcacaccagcccccagcatctgctacaaatcagggcacaagaatgtgtctcacaggcttcctcacccaccccgccccacgggtatgctcaccagccggcactgatgcattcagagagcatggaggaggactgctcgtgtgagggggccaaggatggcttccaagacagtaagagttcaagtacattgaccaaaggttgccatgacagccctctgctcttgagtaccggtggacctggggaccctgaatctttgctaggaactgtgagtcatgcccaagaattggggatacatccctatggtcatcagccaactgctgcattcagtaaaaataaggtgcccagcagaggtaagtgtctcctcacagtggaagtcctgggccagtctgccctaatcaactgactcagtaatgttatcttttttcagctagtattctgtgttcctaagaaaaaaagaatttctgagcttcacgaccttcttggggagaagcatgtaggaagtgggtattggtgggcaaggggtccattttcaaaatcaaaggaccatgatacaaaattaacacttagtcaataagatagatgatccatttcccttattcataccacagtttcttggaatccagaaattcctgactgccatccaaacagctaactttaaacttgtgcaatagaaaaaaagtcagcccaacataatttagtgtaaatagtgtgggaacaagagtcagagcaccttaattctgctcttgcagctatcataaatacgataactttgtcatttaatccctctgattctgattttcctcatctgtgaagaaggtgttggaggaacaatggagtatcttacggtgtatctgtggagatgaaaacatgtatatatgtgtttgtttctacataatgtttgcatgagagagagaggcacattcagatcatctgaaatgtttgagttcagtgcataaatgtgaggtattattactctggtcgttttattagtgagctaaatgcagaatattacagcatcataagggcccccattatcatttcattttgtaccactttataattaatgagtatattcattatcattctgaaggagatcaggattgcaattagtaagttatacttagaaaatatagttccattagcatcacggcattcatcctagacaaaatcaggaatcttgcaatttaccactcctcaccattgccatccaagggaataaaaagcaatttatctgtaaactgtacaaccctgagactgagcagtttcttccatccttccctccccggaactacctgcatctcctgccctgtcatttaaagtcagtgctgaaaactcagccccagggggaattcggtcctgcagcacagagcagtagagaaggccttgctgtaaagcggtgtctgtgaaaacgccttggtggtgccaggttgtactcattatgcgctcttaggggggaattgttgcctgaaatgccaattcaatcctgaccttttgaacagatgggtgtcatccagctgagagattggctccagtgagatgtactgtgttcacctgtggctgctgtattcttagtagacataggagggtgggagctttcagaaccagatcataggtggaatggttaacagacctgagggtgtttaggattgggaggaaaaactaagagaaacatcacgcttgttagatggaagaagggattagatttttctgggttcatattatggggcagaaccaagatcaagatagaagttgcagcaaatttcaacaccctgtggaagacctttataagaactctccagaacaggctgccttagcagcctgggagctttctaacagaggtgggataatggtatggggatgttgtggaaaagattcccctgcaaatggaagcttccagcagattagcacactatagttggcatgaaaaggagatgagctcacgtttctttttttttttttttttgagacggagtcttgctctgtcacccaggctggagtgcagtggtgcgatctcagctcactgcaagctctgcctacaatgctcacgccattctcctgcctcagcctcccgagtagctgggactacatgtgcccgccaccacgcccggctaattttttgtatttttagtagagacagggtttcaccgtgttagccaggatggtctcgatctcctgacctcgtgatccgcacgccttggcctcccaaagtgctgggattacaggcatgagccaccgcgcccggctgagctcacatgtgccaggcaccaaatgctgttcacatacggattcatttaatccttacaacaaccctacaaccctagaataaccaactcttattcccatttaccagtgaaacagcggaggcacagagattaagtaacttgtccccaaagtcaagaggtagtcaggggcagctgaacataagagtactcacactagctgtcactgacacgagagatgctcaccgagcaagtcccgggtgtgcagggcactgaggaaggagcatagctgcagcaaacagtgctgctgccctccacccctgccccaggctgagttaccgtgtactttcaatacttcctgaaatgtttttcttcaaaaattattttctctagtttctctttaccttccttcctgtgtgacttgtgtgtgtagaaagtctggagagcataattccccattgtcccctgattgtcagaggaccccttcttcggcaggcacgctagtctgttgagtacccactgttggtgcaagtgctgtgggcgcaccagaggagggagagattacttcaatccaaggaacaacgtaggtttccagcaataagtagcctgtgggttgggtcctggtggatgaagaaggtttgccatttggatctagaggagaagcaagagaaaagaacaatgggtgagactgtctcaaggaattttccaaggacagcagcaggcttggctggtttgaagtacagtgtacatgaaggcattagtagaagctaaggacagaggttttctaaaatgcatcgtctagattcagctgtactgtgaaaaaaactcaagttttttttttttttttttttttttttggcagagtctcacactgtcacccatgctggagtgcagtggcacgatctcggctcactgcaacctacccctcctgggttcaagcgattctcctgcctcagcctcctaagtagctaggattacaggtgtgcactaccgcacccggctaatttttttttgtagagacggggtttcaccatgttggccaggctggtcttgaactcctgacttcaagtgatccaaccacctcggcctcacaaagtgctgggattacaggcatgagccaccatgcctggctttcaggtttcttttaaaaactccagagcttacatttttactttactgaaaaaatcatcagataatttgctgttcacttctgtcacgaaaggcttataatgctgtgcccccaccactctgcaggcaagtgggggagctcactcttctcaacctttttgccaggaaggaatgcctgctgtttcttttaatggtccctccatctcaactgtgttgcacaagactctactgtaggtgctgtgagaatgcagagatgaaaggataacctgtcctcagggagcttctactctactaggggatgtaaaacaagctcataaacagctttgctatgaagtgctaggtactgagtgctgcaagaagtatcactgagaagagcagagctagtgtgatcttcttagcatttcttaagggtagatgaacagggattgttggtgttatttagttactttttgagtcagggtcttgctctgtcacctaggctagagtgcagtggtgcaaccacggttcactgcagcctcgacctcctgggctcaagcagtcctcccacctcaacctcctgagcagctgggactacaggcgcgtgccactacacccagctaattttttttttcctttggtatagatggggtcttgctatgtcgccggggctgatcttgaactcctgggctcaaacaatcctcccttcttggcctcccaaaatgctggtattacaggcatgagccaccacacccagccatattggtattagtaaaggaaaattagatgccatcatatcagtgtccatggttacctatttccttgatggcgatttgccaccagccagtatgaggccaggcactgtgagagcactaagcaggcagcatgccaaaggtttcttcccaatttgtagaagtgtcaggatttcacatgccccatgctgtccgtaatctccctgcctgccaccctagaaggaaaaacaaggtttgtctttcttctatagtggtacacacacttgatctttttgactttgcaaataaacacagcagcataaccaatctacaccatgagattaccaactggaactcacaaagaaaaccacatcctcttctctgagctcagtcagcctcagctttattactcaggcctcatagagcagtaaaatgctgacagagtgggaggggttaccccagaacctttaaggggagtatgcagtcacgttattgctcccattttctctcaaaacccagtaagtgagtcaggacgagtcaacattgacagattcaatagagaattgtgcaggttgccccaaagttccccgggaaggtgggtggcgtgcattgtgtccatttgtgcacttttccccttgtgtgatcggacgatcatcccacctctgcactctcttagctttagtttgataaatattcgagcatgtagctcttgggaaccatctttcctccatgactttggtagctgctgaattggcataaagggttgccaaagatttgatcctgaatgtcatgttccttgggcagtgggttagtctgtttgtaccccccaaaatggtcgatagggtcttatttatagagtgtcacaaaggacttctagactcagggtcagcattcttaccaaaaatcagacttgacttatttggtcttttacagttgattaaagactctttcacatgtgttgtcttttcgagcccccaaacaaccgtcatttttcagatcaggaaccttgaggagaagctgaaagatttgccaacactttgctggtgagggagctgggtcctgacttcaagttttctgatcccctggtcatgtattttttcctttacgcctccttgcccactctgcaccctccaagcacagctgccaagtgaaagatgctagcccttccaggtctttgacctactgatgatactgaaacttgagcagacagagccctggggtatcccctgactcctattaatactctttttcatctggcttttaactgacatttgtctgtcctgaatcagaggcttctcctggaaattaaagtttccctgagtcatttgttcatttacatatgggtatattgtccctcataattctgcaagcagggttctgtgattaaatcaatttccttgtttgtttttgtcagctgactcagcacgtccttatgcactcagaaataacatctctaaactgaatataaatcatgctagactttattgagcctttacagtgtagtaacctctatgaagcactccacacccatggagtcagtccagttgtacagataactaagacccagcaaagcaagataacttgcccgagctcctgctcctcaggaagcagctaagccaggattcacggccaactcttcctgaccccagaacttgtgctcatgacccttgtgctcaactccagcttggctgagggatgagctctgggctgggagtcaggaaggccccctacatgatttgtcaggtggttgcttgctctgtcttggtgcctacaggcatcagacctgaaggcggggaagacagcagacaaggcagagcccaaaggagggtgggtgttttggtttgcagaggccccattctcagggataaaaacaagtctgagagagggaaggaaaagagccttaaaagacacagcaaacaaaccaaaacactgaggcctccagaagaggcaggaaggctccaaccaggactatatacattttgttagctttgctgtttcctcatggttagtaatgatgttttaaaaatctttaaacaggagagcgctcatgtttgtccttgcggagagcaaagagatgcaactgatgagatttgcatccaactatataatcaggcttaaaggaaaaaagcaccccgaggaattgagtggatgatgttagttatcaaagaagacaatataggtttttgaaaaagtaagaagcggctgctcgcattgcttcttggcaaagcagacagaatcaccatttcctcactcccacacaaccatgttgccccacttcctgccagtggtttttggttggccctggcgccaacatgcgagcagtgcccactgagaggaattgggcagagtgggtaggacgggcgggctaatcccacagagcaagtcctggtgtaggttttcttttatcttctctctgctggcttttagctttctgtagcaaaatagttggcttctggctgttccttttacctctttgctcagagaactttcaaaagatttctcacttgccatcatctttggtagctgggaagctccctcctctaatttttctccagaatgtcttgcattactagcaatgggcatgtcagttagctcccctccctttccatcctgcctctgcccctaagtcccagcctaaccttaatcattatagaaaaccattgaaatacagagacctgaaatcctttacccaacattcaagaagtatgctttactttcattatttaaatagatcattggaatggcacagttagcattacagctgtgtttgctattaagagcttttgttttaaacttagtcccaccaagagtcagttcatccaagataagctcagtagtttccaagaagctttaactcagaaaaccaaccaagcaaacacaacttattttcaagtcccaggcttttaaagactgaagtcaaaagtgctaccaggaggatcctgtcaacataggtgtggctttgatagtcttcttgactatccttgatcaagaagaagtactcattcctttttctctccaattctagtccatagaatggtatgctctgacaggatagtaacccatattaagagagtatttatttttattattcttttttgagatagagtctcactctgttgcccaggctggagtgcagtggcatggtcttggctcactgcaatctctgccttctgagttcaagcaattcccctgcctcagcctcctgagtagctgggactacaggtgcacaccaccacacccagctaatttttgtaattttagtagaggtggggtttcaccatgttggccaggctggtctcaaactcctgacctcaggtgatccacccgccccggcctcccaaaatgctgggattacacgcacccggcctaaagagcatttactgacatcagtgaaagagatcataatactgggtataggacaatgttctagaacactgaagattcacagacatacatgagatatagttcttgcctgcaaagaatttatagtctaatgtgaatgattaagtacataattgaacatggtaccaaggataatgttagagcaatcagagacaaagtcttttgaagtttaaaggaagagatgatctatttctgtttgaaaggaaaagtttaataaaaacaatagcatatgataatggatgtagaatgatgagttgctttggattggcaggagtgaaggcagaagaatcagttatttgcagatagaaggaacagtgagggcaaatgcatagaattgtgcatagatggggaacagttaagtggtcccatttgactagagcttagaatgtatggagaggggaatatgagacactgattggaagatagcccagggcagtgttgtaaaatgaaagtgaatggactacagaacggttggtctttgtagggtagtagtaggggattggttatgaggctagcataataatccaggcaagaggtaatcaggtttccatgagattggcaacaaagggactgaagtgaccagcattgcagagttagattcagcaccaggagtaaggaatcaatagtggccccaagagcttatgcctggaagatttggaaaatgaggcatcaaaacgacaatgtctgaaggagtagcaggttatgggggaagtggatgggtttggaattggacatggtaagtgttacatgctggttagatatccagggaaagatacctagtaagtagctggaagtatggatctggggcttaaaggagcacttcagtaattctttacataaaggcagtacagccatgaaaatagatgatgttgccagagtaagtgtggggagagagaaggtcaaggacaaaaatgtggagagtacttgcttagaaagggtggaggggccatcaaaggagtcagaagcagcagttagagaagtagaaagaggagagtagcagcgtggtacactgaggtcaccgggggaggagagaggacgcagccagccacagaacagatgcatcctctagggctagagggtcctgaaagctccgagagtaattctcatgtgcatttaggtttgggaatagatcactgttaattcaacagagaaatgaaagaagagaaggttcggtggggtccagccatgccctgttacgtggaattttttccctaagggtgtggtcccctcccctacagctcgtcttttggagggctggtccaggctcctctaagccatgacgccggctgaggatcagcggttggtgtacatgatctcctcagccttgcccattgtcccttgcaagacatttcttggatgggagtttccagtgctgggagaagttccgccccactgactctattctgctgtgtctcctcagagcctgtcatagggaactgcatggatagaagttctccaggacaagcagtggagctgccggatcacaatgggctcgggtacccagcacgcccctccgtccatgagcaccacaggccccgggccctccagagacaccacacgatccagaacagcgacgatgcttatgtatgttggtcccacctgctgcacagaggtggatcctcccagtcccagccttgaaacagagtatagtgatgtggggtagcctctcttggccgctctcctcagtcagcattcagcctttctggaaacggtggggagcatttctttttttttcttttttgagatggagtctcactctgtcgcccaggcgggaggacagtggcgcgatatcagctcactgcaacttctacctccccagttcaagtgacttttgtgcctcagcttcctgagtagctgggactacaggtgcctgccaccacacctggctaatttttgtatttttagtaggcatggggttttaccatgttggctaggctggtctcgaattcctgagctcaggcaattcgcctaccttaagagcattttctttgagtcaccctaacagaccaaaccttaattcaagtagaatctatgctccaaattttagaccaaagaatcagaaatagttgccatctgttccctgtagttttggttattaaacctcttctcagtctaaactcaggccccagcaaatgagcccataggcttctggttatttttcagcagctacattgagcttactcagatcaggggagctggtgggcctcagcaaagttttgttttcctagggtggtgctagtctagtagctagccacatgtggctattcaaatctaaaccaattaaaattaaaaacaatttaaaattcagttcctcagtcacaccagttacactttattttttattattattattttttgagacagagtcttgctctgtcacccaggttggagtgcagtggcgcaatctcggctcactgcaagctccgcctcccgggttcacgccattctcctgcctcaacctcccgagtagctgggactacaggcgcccgccacccttttttgtatttttagtagagctaaatttttttagcccagctaatttttcgtatttttagtagagacggggtttcaccgtgttagccaggatggtctcgatctcctgacctcatgatccaccagcctcagcctcccaaagtgctgggattacaggcatgagccaccgtgcccagcccagtcacactttaagtgctcagtagccacttgtggctactggttaccatattggacaggacagagaacatttccatcactgcagagtgtgactggacggtgctgtcctaagacaaagtcccagtggagatggggataggtcagaaacctggttttagaaggccatgtaggtatcaagatgtcaccaccagctgagatttgccacatccgccccaccctcagcccccccactgggcagagccaagcagcttcccacactgtcgctgtggagcaccccctttgggtggtgctttagaggaaggagtctggagtggggccccgggctgtcttttgcctgggctccttcagaaggaccagctgtctctaggggttgcctgagagtggtgtcttgtgtgcttatttcttctcttaactgttttctgcaggtacagctggataacttgccaggaatgagtctcgtggctgggaaagcacttagctctgcccggatgtcggatgcagttctcagtcagtcttcgctcatgggcagccagcagtttcaggatggggaaaatgagggtgaggagccttatgcatggggcactccagagaagttcctggaggggcctccctccatcttccgtaactgctcctctcttcgtaggaagagctcatggggaggtagagccacagcatcccacaggttctggacacagcccctttccccactggtcttccctgagtgtgggtgtgtaaaggaggtgtggcttctggccagatggcacagggctctcccattcctgtctctcatctctgtgatgatatgccttcaatcactttttccagttctgcttagagggcatcaggtcctaatggcacatttctacctcttcttggagccagtcaagggagggtgtcataacaaataataggcgtaggccttgggcggggcaggtctgccaccagtcccaaggctgtccttttcaggctctgcaggtgaggcacttggctttctggaccccgagatcctcatctgtaaagtggcaaaaacgatagagcctttatcctacattgtgccctgagggctggctggcttagtgagtatcaagtgcttagcacagtgtctggaagacagacagtgcccaggaatgggtgcctgcaggcagtaaaattattctccctttcactctttaagaggtgatcctttctgaaggagtcctctatcttctctcacactacagtagttgatcttacctaaggatgggaaagggtaaaggaaaagggaaaaaagcagaacaggtagaggagaatataggaagaatcttggcccccgcccatcgtcactcaacaccttgagggcctgctgtgagctagaattcagggctgggagtcaggctgtgggatgctcgacaggttgccttcaattcctcctctctctcccccttgctctcctagtcccccagttccctgccaacctcatacgttctttttggtcttgcagaatgtggggcaagcctgggaggtcatgagcacccagacctgagtgatggcagccagcatttaaactcctcttgctatccatctacgtgtattacagacattctgctcagctacaagcaccccgaagtctccttcagcatggagcaggcaggcgtgtaacaagaaacagagagtgagtgtcaccctggccagagccaaaccagccctgtggcccagtgcctgctcccaatcccatcaggagcttcagcccatgtgttgtggtggccagtgcagtcgacagtaccacgcctcccctcgtggccttcacagtttcttgcttttcattaacgacgctgctagttttagggcgcgaggtaggggtgggggtgtgcagaagaaatgctaaacacagtctcttggttcggttatgggaataagacacaagactcgccgtgtgttacaggtgctctagccttcatagcgacagaagtgagctacggctccagaggatgcaggtgacctccggtcagcataatgaggaaaggaggaagtccttaaactcagtcctaaaagacaaaacctggcaggaaaatatgtccagccatattttttaaggccatacagaagcaagtggcaggatattccagattagggaaatgtgtgatgagaggcccatggtagaaagaatggggaaattggcttgtttggctggagtaatgcaaagagtacacagcaggcaccattggttgtatctggaaaatccttgacagaagaggcctgatgaaagggaagccacttggcaaatccacatcagagcctcagtatggcaagctacctgaacacctgagggaaagtaaacccgttgcattttttaaaaggttttaaatggaatatttgagcctttctcttttcaaactaattctcctctgtgtctgctttattccaggttttgtgtacagcttgggaatgaaaaggttgattgtaaacccacagtatctagcagcgttgtgccaaattgcccttgtgtttctctccacccaaaatatcacagctgctttcctcacatttggttcatccgtgtgctgttcttttgggttctgagagggttttgccatgtttgcttgtatgaccaagtcaccaaggaaataaacaggaaggaaatcc

SEQ ID NO: 13969 - DNA, 3459 bp, Homo sapiens
aattcatttgttttttgtgttgctgaaccaaatacatgttcgtgctcatttcattagctcactgctgggtcaagcctcaggtagagtctgaaacaaaagccatcattagcaaagacagggtaaaaggctttcacctgctgccagaactctctggatacctctgcacggtcattagattcctcctggtcccgcgctgtctgcattgtatttgaactcgcttgttaacctgcttcctgagctgtggttctgcttcagtcccaaatgaatcactggcaaggtagcacatcatttcatccaaagttcagtgtaatggcatctctgccctggacatgaaaccctgatcctttccatctgctactggaatgctgctgccttggcagtcttttatctgcttacctcagcccataaacatctctttctgatcatcaggtcacaagagtaggtgttagcttctaaccccgatgctgtcttaggcattccttatcaatagcttgttctttctttctgtaagattctggctgtgttccagttgagcagtggggtctttgaaggtaatccatatgattcctctttcattaggaggttgggtgagtgctgctgctctgagaagttgattttcacagtaggtgaccttatttgttgaccaggtacgtgcaggatctcaaggcccacattccttaagaatttgttgtctccatcccaggatcagaagtcttcattttcccccaccccaatcgccaccttctattttctgtcacagaacctatgagttctaggccagacctttgaccacaaaactgactgttgtttccctctggccatacggagatcattgctcagggaaaactttggctcaaatggtgaatttaaggtttctaaaggcactagatagacatatgattataaaagcaagagcttctgtacagtctggcctggaggatattgagaagcttttctctctggcctagtgtatttataagaactggatgtacttgatctcgggacctcaccaggcttggaaagtaagccaaccgaaggtaagtagaaatggaagatgtacacctggagccctctaaagggaagcaggctagggaaacgactgatgtctggaaatggcatgaaagtggcataatatgcagggctacctgggcagccagccgtctttatgttcatctggaacagcagtccctgtgtgatttggtcaaagcccctgagtcctagcctctaaccttctcttcccatatattcagctctacctacaaggactccaacactctgcacctccctacggagcgtttctcccctgtgcgccggttctcagatggggctgcgagcatccaggccttcaaagctcacctggaaaaaatgggcaacaacagcagcatcaaacagctgcagcaggagtgtgagcagctgcagaagatgtacggggggcagattgatgaaagaaccctggagaagacccagcagcagcatatgttataccagcaggagcagcaccatcaaattctccagcaacaaattcaagactctatctgtcctcctcagccatctccacctcttcaggctgcatgtgaaaatcagccagccctccttacccatcagctccagaggttaaggattcagccttcaagcccaccccccaaccaccccaacaaccatctcttcaggcagcccagtaatagtcctccccccatgagcagtgccatgatccagcctcacggggctgcatcttcttcccagtttcaaggcttaccttcccgcagtgcaatctttcagcagcaacctgagaactgttcctctcctcccaacgtggcactaacctgcttgggtatgcagcagcctgctcagtcacagcaggtcaccatccaagtccaagagcctgttgacatgctcagcaacatgccaggcacagctgcaggctccagtgggcgcggcatctccatcagccccagtgctggtcagatgcagatgcagcaccgtaccaacctgatggccaccctcagctatgggcaccgtcccttgtccaagcagctgagtgctgacagtgcagaggctcacagtgcacatcagcagccgccacactataccacgtcggcactacagcaggccctgctgtctcccacgccgccagactatacaagacaccagcaggtaccccacatccttcaaggactgctttctccccggcattcgctcaccggccactcggacatccggctgcccccaacagagtttgcacagctcattaaaaggcagcagcaacaacggcagcagcagcagcaacagcagcaacagcaagaataccaggaactgttcaggcacatgaaccaaggggatgcggggagtctggctcccagccttgggggacagagcatgacagagcgccaggctttatcttatcaaaatgctgactcttatcaccatcacaccagcccccagcatctgctacaaatcagggcacaagaatgtgtctcacaggcttcctcacccaccccgccccacgggtatgctcaccagccggcactgatgcattcagagagcatggaggaggactgctcgtgtgagggggccaaggatggcttccaagacagtaagagttcaagtacattgaccaaaggttgccatgacagccctctgctcttgagtaccggtggacctggggaccctgaatctttgctaggaactgtgagtcatgcccaagaattggggatacatccctatggtcatcagccaactgctgcattcagtaaaaataaggtgcccagcagagagcctgtcatagggaactgcatggatagaagttctccaggacaagcagtggagctgccggatcacaatgggctcgggtacccagcacgcccctccgtccatgagcaccacaggccccgggccctccagagacaccacacgatccagaacagcgacgatgcttatgtacagctggataacttgccaggaatgagtctcgtggctgggaaagcacttagctctgcccggatgtcggatgcagttctcagtcagtcttcgctcatgggcagccagcagtttcaggatggggaaaatgaggaatgtggggcaagcctgggaggtcatgagcacccagacctgagtgatggcagccagcatttaaactcctcttgctatccatctacgtgtattacagacattctgctcagctacaagcaccccgaagtctccttcagcatggagcaggcaggcgtgtaacaagaaacagagagttttgtgtacagcttgggaatgaaaaggttgattgtaaacccacagtatctagcagcgttgtgccaaattgcccttgtgtttctctccacccaaaatatcacagctgctttcctcacatttggttcatccgtgtgctgttcttttgggttctgagagggttttgccatgtttgcttgtatgaccaagtcaccaaggaaataaacaggaaggaaatcc

SEQ ID NO: 13970 - DNA, 1474 bp, Homo sapiens
aagactcattatttctctctagtgttaaaggtatgcgtgtatatgtatgtactgctttccaggcggagcaggcaggtactgctatgaacatcagcgttccccaggtgcagctgatcaacccagagaaccaaattgtggaggcaagtagcaacctgtgggagctgtcagctgaaaccactttctttgccatatccttgcttcccttccttctgatttctaactcgatggtgtttccctccacctcagccggatgggacactgaatttggacagtgatgagggtgaagagccttcccctgaagcattggtgcgctatttgtcaatgaggaggcacacagtgggtgtggctgacccacggtgagtatccggccaacagccctcactaacactggggcaaagaattgtcacctgactttcagtgtctaccatggcacatttcctactacattgtatccccagaggagatctaatccagtggccaagtggacaaatgatatgatgtaacttatgtatgtagacaattaaaatttaaatgaataaggatccaaaatccaataacaacagtttcccaaagtgttttcccaaaatagtctttcatgatgttccctgctgcctgcacactggaaaaaatggactgaaggccagctcgccccatttttgttccacggttgaagactctcaacattaaaatagccttacctcttttctggattttttctttgctgagtaggaagagaaggttgtgggaagaattctcctgagaggtcaaatcagggcaaagctggttttcttataaatatctcttttcttccagtgaatttccaaaaaagactcccatgcctgctgatgtgcttgctttatgtctcttgttctcagcctatgatcaaataggcaataggggaacattctggctccacagactgagatagctttaaaggggtggagccctgagtcgctctgttagtggaaagatgtcttactttaaagtatgctgtaaaacctatcattgtagcaagatagccctgtacatctagtacttatctgtcctatcagcactgacaagagtaattgcattctttccctggtgaatcagttgctacttcaggcagccattatcttagtggatggcccatgttctccagaaacttggtgttcacctccaggatttgaaaacctgaactggactggtgccactatttcctcttggctcagagctgttggttttacatgaatggccaataaagaatagcaatccttcgtcccaaatagtaaaggagcagagagttaaattccacactttaggcttttgctttgctttaggatcttaaagagaaacataaattcaggaagaaaataaaataagttgtactgaacatagcaatgccatcagttttgggatataagcacttttgagtaagaatgttaactaaacttctctgtcattctgttttgtatcagcacggaagttatggaag

SEQ ID NO: 13971 - DNA, 267 bp, Homo sapiens
aagactcattatttctctctagtgttaaaggtatgcgtgtatatgtatgtactgctttccaggcggagcaggcaggtactgctatgaacatcagcgttccccaggtgcagctgatcaacccagagaaccaaattgtggagccggatgggacactgaatttggacagtgatgagggtgaagagccttcccctgaagcattggtgcgctatttgtcaatgaggaggcacacagtgggtgtggctgacccacgcacggaagttatggaag

SEQ ID NO: 13972 - DNA, 5985 bp, Homo sapiens
tctcatggtccgtcctccccactctgttcctggcaggagcagtctctcctacagccgcccacgctacagctgttgaatggaatgggcccccttggccggagggcatcagatggaggagccaacatccaactgcatgcccagcagctgctgaagcgcccacggggaccctctccgcttgtcaccatgacaccagtgagtagcagcacagagcccaattcactgtctcagaggcttttgataaaaaggttgtgagcctggggttgggaacccagggccaacctacatgtctgaatttcctttttctccaaacttaggatgctccagcccattttcttcaggccagtagagttttccacactttatttttggcgaacttacttacttagccaagttatttctacattgaactccactcctggagagctttttcctcaatgggcgctcacaggtaccctggttaagtccagctgcactcctgccagcttggggcaggtagcagcctaactcagagccttctcccaggcaacctttccctgccagaaggccaaagtgcccttaaattaattggtttctagactggcttccaaaattgccttttcactaatgctttctccattgataaacacacctcacatgtttggcataacctggatcacttgatgatttgctcccacagctttagccgagtcagttatcttagtcacatgtccttcatatgatagtcacattcagagattttttttctcccttgggttctgtttattttcctgtcataggtcattcattcattcatttattcattcaatctcatagtaccataagattgggtagtaaatatatccatcacccttggagatgttgtaagggcagtgctgctttgaggacccttttccctcctttaatccatcatgggttaatcccttgtaaaatatagtaaaagtgaaacattagaacagtgaaaatttaaacacatataaaatacaaggcattttttattgagttcaacagacaaaattactctgttaaattgctaaaagtgtctctttatttatttttttaaattgctaaaagtttctgaaagccttttgttgatttctgtacttaccttatcatgaattggtaacaaaacagtttgtgggcatgggtccatgggccacactttcagtaatgaaagaattatatatcatagcccttgccatcactgacaagatcaacatatgtgaagtatttgactaatagtacaagatcatatgtgattaagtaccacagtaataacatggaaaattaggtggcagaggcattcagagatgggcaagacaggtttggaaggatcatggtcagctttatgggacgtggggtgacttactgtgtctactgtaactgtttttgccaaggtcgctaacaagttcttgttgataaattcagtggacatttttaaccttttatctttttggacgtcccaactgtattaatcactgttgacttcttttttccttgaaatattttctgttcttggtgtctgtggcaccacattccctgtgttttcccccacctctccttttcacatttcctttctgcttgttccttgaggttggcaaaacccagagttttatcctaggccctattcccatgtcctttgatgtactctctctggatgagtttgtccactcctgtaatttcagttactctctgattctccagcccagaatgctcctctgagttctacacatacgtgtacatgactgcctatgggatagatttagttggttattccacaagtattcacaactttaattcagcatgtcccaaatgaacttaccatgactctgtaaaacctgctcctcctcttgggtgacagtgaatggcactgtcattctccgggttacacaagctagggatgtgaattttatctttaactcttgtctttcttatttgccatatcaagtcagttgtccagtgcctgtgaatgaaacatcctctccactttcctttccttaactcaggtcactgtcatccattgtgtagatgaacaccacggcatcctaactgacttctttgcttccagtcatgtcccctgatccctgccaccagcccttttcacactgcagctagagtaagctggcttttgcaaatataaatctttataacatcatgcccctgcttaaaatcctttagtgattcaccactgttcttcctcaaacttcttagtgtgttattcaagaccatttgtcactggccacagcgttcctctcctgcctcatctacagccacttcctgcctcaccctgttcactccacccttgtagaactgtgggaagggatccaggaaccctgggagctttccgacaaaattattccaggagtgttttgttttgttttgttttgtaattagccattttgtaaaatactcttttataataattgaagtgtgatttttgttctagtgactggggcatggtgatgatgtgggcacccaggctatgggtagctagcaaggatgcagatgggaaagtcacagtgatacaagcattgtggtggttctcatttcactcacatgttttggcgagtaacaactattttaaagcagtgaattgatactacacaattgtatcttatgtaccaaaatgtaatttcagtaattcactatgctttcctggagttaagacatttaaactccggaaatcacattaatatgaaacaacaggtcaagtcctagacatttcaggtaaacaatcttctactgtattttcgggtcctcaaacacctacaggccttctcttttcttctgcctggaaacctgtaactcctgtccctctttgcctgaccagctcctgtgcatccttcaggttcctgctaggtgctacctcctccaggatgccttccttaattcccaaacacccccattagaagacttgatcatgctattttgtaattgtttacttgtctctatcctctactagactgtaaaatgagggcaaggtctatgtctgtaaattcacattttatcctgtaacagtaagcatttggctatttgttagattaataaatgaatgaatgaagataaataagaggaagaaattctaattagtattacctaagcaaggtaaaaatggaaaaataggtatatgaaaatcctgtataacccaggagtctagaaaagttctgtaaataagaaagttaacagaaagtcctgccccaagcccagttactagagtaagaggcatgacagaataagctgccaccttgagcttttccttcctgtctctcttcaggcagtgccagcagttacccctgtggacgaggagagctcagacggggagccagaccaggaagctgtgcagaggtaatgtgacatctggcagtgcttgcagaagcccctgggcaggctcccctgcaaccagcgaaaggtcacctctgcccaaggaggtggtagagtgcagcttcaacatttgtgtggtctctttgctcaagccagatggcatgttccaccccacatggaagtaacagaagactacccagaaaatgtcatttctgtaagcaccattggaagtcccctaagtgacagcaataaccataagaactttttctttcctccctccttcttccttgtcccctgccttcatattgcaactctgatagtattcacaaggcacaaagcctgctcgtacctgccaagaactgtttactgaaaaggaattggagatgtgggatgacagtgatcctagctagtctggccatggacctctggcatggacttttcctttccaggagaatgaatacctcttgtactgtttgctgtgtgcttcttccacccccttgtaccaacaaagagatattgaaaaagagaatatgggattcgggccagggacagatgcaaatatccattgtttacagaaccttgttgagagatgcctaactcacagagaacggcagtgaccatcaggcatgctgtactgttcatttggcctcagttccgttagccctggtccttagctccatgcatgcccccttgtgggagttgattttcttattatccggggagggggtttcaccagaatccagcatgtattttcccagaaatacaggtgttcttcaagattatatgttttttcctttgagggaagttgaaataaaatggttttcatgggcttttggggaactttgggtgtctttatccaatggttattaaaacattaatggcttactctttggcaagttcacataacactgattactctacagtctgttaactgattttagctgaaaggggcaagatagttaagaatgaaatgagaccattttttaagaacctgccagttgctggctaggactctcatcctatccccagtagctctgtgtgagagctgctattcagaaagcagctggtcctatgtggaaagaaaaccatggcaaacaggggtgttggcaggtgggccagctccttctacagcttggccaatagaaggaaaattctggtaacttttttttttccttgatgctgttgtttctatagtttgctgataagagggtatataaggttacaaatgggccctactgggtcatgaagaaatgagaaatcaggaaatttactgcctttctaccttaaaagagacagcaatattttatcttctttgtcttagactttccttcctccaggtctaccttctttcttctttagaccaacatttcaagggtataatgcccatcagttttgatgtaataaaaaaggtgtagtgcctcttttattcatgcctccagaagagcagcagcggtggaggaagtcatccaccagacaaagagggacaatatcttattgatggtattaactaagtgctgggtctgaaagatcttccgaataaaagccatcagtttgggaactcttcgtcttgtgagactcttctgtttttattttttgccttgctttttccctccctaactaaacatttcatgtggttttatttcttcatcctccacagaatgttggttccccaaggacaacatcagtttttcttctctgatgattgagttatagtcaccaagcgagagggaaagggtggttttggaattcatttatcctcaaatggaaggatcagttttctgtgacctgtagtgaagaaagtctcaaacctggggcctgtgagatcgagagacatgcacagagtccttctgaatatctccccaggttcatctctaggaatagtccttagggctcatttcctctgacttgtattttggaaatttggagggaaaagatgaataaattaacatggagaaaataaattcttctaccgagtagaatgaagcaaggaaaagtgatctcatctttgtgagctagatctactttctctcttctcttcaatggctattcttaggttcaaaattcagccacttcattgtcaagccaacttctgttggccagttagacgtgtctcacttccatccaggcagggatctgtttgccatcaagccttcgtgagctctggcactatttcattgagtgctttggattaacttctaatgcttcttgtggaggaatattcctgtctgtcttttttactatgaaatgtgctcctgcttgttgcaggtacttggcaaataggtccaaaagacatacactggccatgaccaaccctacagctgagatcccaccggacctacaacggcagctaggacagcagcctttccgttcccgggtctggcctcctcacctggtacctgatcagcatcggtgagtagccacatgagctgtgcgagctccttgaggctcatcggacaggcacccttctgattagtctcacagcgacggtgactagcatcgtggctttaaatagaagccagctgtcatcctgaactcacatcttctcagctccttgcagtaagcaatgcacagggcaaaggttttttactgcgccctggagcaatgcgagattcctctctcccattaccttgcagacctgtttattgtctgcatttgattcccatgatt

SEQ ID NO: 13973 - DNA, 665 bp, Homo sapiens
tctcatggtccgtcctccccactctgttcctggcaggagcagtctctcctacagccgcccacgctacagctgttgaatggaatgggcccccttggccggagggcatcagatggaggagccaacatccaactgcatgcccagcagctgctgaagcgcccacggggaccctctccgcttgtcaccatgacaccagcagtgccagcagttacccctgtggacgaggagagctcagacggggagccagaccaggaagctgtgcagaggtacttggcaaataggtccaaaagacatacactggccatgaccaaccctacagctgagatcccaccggacctacaacggcagctaggacagcagcctttccgttcccgggtctggcctcctcacctggtacctgatcagcatcggtgagtagccacatgagctgtgcgagctccttgaggctcatcggacaggcacccttctgattagtctcacagcgacggtgactagcatcgtggctttaaatagaagccagctgtcatcctgaactcacatcttctcagctccttgcagtaagcaatgcacagggcaaaggttttttactgcgccctggagcaatgcgagattcctctctcccattaccttgcagacctgtttattgtctgcatttgattcccatgatt

SEQ ID NO: 13974 - DNA, 4471 bp, Homo sapiens
ggttaaggattcagccttcaagcccaccccccaaccaccccaacaaccatctcttcaggcagcccagtaatagtcctccccccatgagcagtgccatgatccagcctcacggtgagtggagaggttcagaccaaacagttcattttatgccacatgggaaaaaatgatggtctcagttttgagcaccataaaccatttgaaaggcagaataacatagtattcaggggtatggactctagagccaagctgctttggtttgcatcctggttccatcagtttcttagctgtaaacccttgggtaagttaacttgacttcttgaattagtccatttcacactgctctaaagaactgactgagactgggtaattgataaaggaaagaggtttaattgactcacagttccacatggctggggaggcctcagaaaacttacaaccatggcagaaggagaagcaaggctcatcttccatggtggcaggagagagattgcacaggggaaagcgccagaaacttatcagacaaccagatctcaagaattccctcattatcatgagaacagcatggaggaaactgccccgtgatccagtcgcctcccaccaggtccctcccttgacacatggggactacacttcaagatgtgggtacacacagagccaaaccatattacttctcaaatgtcaactgaggataattatggtacagtatgtagatatacgtaaaacacttggaacagtctctggcacaaaatagttctcaataaaggtttactattattaatatttttaacaaaacctccagccctaccaaataaaaagcagctaccagaaccttccttatagacatgcctccgtttggctgtctactatacacgtgggcccctctcttgtgggtgtacagatgggagtgaagataagtataatgtgactgtgagtcttcagaggtcagccgtcttaggatctcttgagtaacactccacgagctacgtccctagtcagtctccctaggatccttgagaagagtctgaattggcctctaggctcttcctacttaaagtggggtcccccagccaccaatattgggagaaaaagtaagatctcaggtcgtattccagacctgttagagtctgttttttttttttttgagatggagtctccccctgtcacccaggctggagtgcagtggtatgatctcggctcactgcaacctccacctccgggttcaaatgattctcctgcctcagcctcccaagtagctgggattacaggcgcccgccaccacacccagctaatttttgtatttttagtagagacagggtttcgccatggtggccaggctggtctcgaactcctgacctcatgatccgcccacctcggcctcccaagtgctgggattacaggtgtgagccaccacgcccggcctagagtctgcatttttaaccagatgccaggccatttgtgtgcatgtgaaagttcaagaagcactgcctagatccgagttaccccatgtaatccatggaccagcttttaagggaacttgttggaaacacaaattcttaggggcccatcctgacctactgaatcagagtttgaaacagaattatatagataggacccaggaatcttctgtttaacaagttctccagacttgtcctatgctcagtgcagtttgagaagcactgttctagctggtatgtcgtctgagtattctcattagctctcattacttctggctggctggtggcctgggcacttggtcactctgaggttcctttctctccaggggctgcatcttcttcccagtttcaaggcttaccttcccgcagtgcaatctttcagcagcaacctgagaactgttcctctcctcccaacgtggcactaacctgcttgggtatgcagcagcctgctcagtcacagcaggtcaccatccaagtccaagagcctgttgacatgctcagcaacatgccaggcacagctgcaggctccagtgggcgcggcatctccatcagccccagtgctggtcagatgcagatgcagcaccgtaccaacctgatggccaccctcagctatgggcaccgtcccttgtccaagcagctgagtgctgacagtgcagaggctcacaggtaagaccgcctaacgtcacccagccatctatgcatgggatccaggtgggaggaagccccttagcagagtgagagaaaaggagggaaggagaatgggtctgactaggctgtgctcttgtttcacgctttctaaaatcaggatgctgggtttggaatgaacttgtcagctttttattgacccagggttaaaattctaatgagactgaggtggaaaatgggaaagctaccttattatttgctaccttattatttgcttgcaaagaagaaaatggcctgttagaggaatgtataaaaattccagttccccttttcttgaagggagcatcttgaagttgcttccttcaaaatgagctagatctattacccacgcagtgccctcagtcccttggaggttactggacaagccagtaatggaataaatagggacaatgcatacatctgccacttctctgtcacaccacagttctctgtaccagtgggttctccctactgaggaggaggagctgttcccaggaagtctagtacttgttacatggatgtctggtactcccttttgtgtctgcagcttgaacgtgaatcggttctcccctgctaactacgaccaggcgcatttacacccccatctgttttcggaccagtcccggggttcccccagcagctacagcccttcaacaggagtggggttctctccaacccaagccctgaaagtccctccacttgaccaattccccaccttccctcccagtgcacatcagcagccgccacactataccacgtcggcactacagcaggccctgctgtctcccacgccgccagactatacaagacaccagcaggtaccccacatccttcaaggactgctttctccccggcattcgctcaccggccactcggacatccggctgcccccaacagagtttgcacagctcattaaaaggcagcagcaacaacggcagcagcagcagcaacagcagcaacagcaagaataccaggaactgttcaggcacatgaaccaaggggatgcggggagtctggctcccagccttgggggacagagcatgacagagcgccaggctttatcttatcaaaatgctgactcttatcaccatcacaccagcccccagcatctgctacaaatcagggcacaagaatgtgtctcacaggcttcctcacccaccccgccccacgggtatgctcaccagccggcactgatgcattcagagagcatggaggaggactgctcgtgtgagggggccaaggatggcttccaagacagtaagagttcaagtacattgaccaaaggttgccatgacagccctctgctcttgagtaccggtggacctggggaccctgaatctttgctaggaactgtgagtcatgcccaagaattggggatacatccctatggtcatcagccaactgctgcattcagtaaaaataaggtgcccagcagaggtaagtgtctcctcacagtggaagtcctgggccagtctgccctaatcaactgactcagtaatgttatcttttttcagctagtattctgtgttcctaagaaaaaaagaatttctgagcttcacgaccttcttggggagaagcatgtaggaagtgggtattggtgggcaaggggtccattttcaaaatcaaaggaccatgatacaaaattaacacttagtcaataagatagatgatccatttcccttattcataccacagtttcttggaatccagaaattcctgactgccatccaaacagctaactttaaacttgtgcaatagaaaaaaagtcagcccaacataatttagtgtaaatagtgtgggaacaagagtcagagcaccttaattctgctcttgcagctatcataaatacgataactttgtcatttaatccctctgattctgattttcctcatctgtgaagaaggtgttggaggaacaatggagtatcttacggtgtatctgtggagatgaaaacatgtatatatgtgtttgtttctacataatgtttgcatgagagagagaggcacattcagatcatctgaaatgtttgagttcagtgcataaatgtgaggtattattactctggtcgttttattagtgagctaaatgcagaatattacagcatcataagggcccccattatcatttcattttgtaccactttataattaatgagtatattcattatcattctgaaggagatcaggattgcaattagtaagttatacttagaaaatatagttccattagcatcacggcattcatcctagacaaaatcaggaatcttgcaatttaccactcctcaccattgccatccaagggaataaaaagcaatttatctgtaaactgtacaa

SEQ ID NO: 13975 - DNA, 2237 bp, Homo sapiens
ggttaaggattcagccttcaagcccaccccccaaccaccccaacaaccatctcttcaggcagcccagtaatagtcctccccccatgagcagtgccatgatccagcctcacggggctgcatcttcttcccagtttcaaggcttaccttcccgcagtgcaatctttcagcagcaacctgagaactgttcctctcctcccaacgtggcactaacctgcttgggtatgcagcagcctgctcagtcacagcaggtcaccatccaagtccaagagcctgttgacatgctcagcaacatgccaggcacagctgcaggctccagtgggcgcggcatctccatcagccccagtgctggtcagatgcagatgcagcaccgtaccaacctgatggccaccctcagctatgggcaccgtcccttgtccaagcagctgagtgctgacagtgcagaggctcacagcttgaacgtgaatcggttctcccctgctaactacgaccaggcgcatttacacccccatctgttttcggaccagtcccggggttcccccagcagctacagcccttcaacaggagtggggttctctccaacccaagccctgaaagtccctccacttgaccaattccccaccttccctcccagtgcacatcagcagccgccacactataccacgtcggcactacagcaggccctgctgtctcccacgccgccagactatacaagacaccagcaggtaccccacatccttcaaggactgctttctccccggcattcgctcaccggccactcggacatccggctgcccccaacagagtttgcacagctcattaaaaggcagcagcaacaacggcagcagcagcagcaacagcagcaacagcaagaataccaggaactgttcaggcacatgaaccaaggggatgcggggagtctggctcccagccttgggggacagagcatgacagagcgccaggctttatcttatcaaaatgctgactcttatcaccatcacaccagcccccagcatctgctacaaatcagggcacaagaatgtgtctcacaggcttcctcacccaccccgccccacgggtatgctcaccagccggcactgatgcattcagagagcatggaggaggactgctcgtgtgagggggccaaggatggcttccaagacagtaagagttcaagtacattgaccaaaggttgccatgacagccctctgctcttgagtaccggtggacctggggaccctgaatctttgctaggaactgtgagtcatgcccaagaattggggatacatccctatggtcatcagccaactgctgcattcagtaaaaataaggtgcccagcagaggtaagtgtctcctcacagtggaagtcctgggccagtctgccctaatcaactgactcagtaatgttatcttttttcagctagtattctgtgttcctaagaaaaaaagaatttctgagcttcacgaccttcttggggagaagcatgtaggaagtgggtattggtgggcaaggggtccattttcaaaatcaaaggaccatgatacaaaattaacacttagtcaataagatagatgatccatttcccttattcataccacagtttcttggaatccagaaattcctgactgccatccaaacagctaactttaaacttgtgcaatagaaaaaaagtcagcccaacataatttagtgtaaatagtgtgggaacaagagtcagagcaccttaattctgctcttgcagctatcataaatacgataactttgtcatttaatccctctgattctgattttcctcatctgtgaagaaggtgttggaggaacaatggagtatcttacggtgtatctgtggagatgaaaacatgtatatatgtgtttgtttctacataatgtttgcatgagagagagaggcacattcagatcatctgaaatgtttgagttcagtgcataaatgtgaggtattattactctggtcgttttattagtgagctaaatgcagaatattacagcatcataagggcccccattatcatttcattttgtaccactttataattaatgagtatattcattatcattctgaaggagatcaggattgcaattagtaagttatacttagaaaatatagttccattagcatcacggcattcatcctagacaaaatcaggaatcttgcaatttaccactcctcaccattgccatccaagggaataaaaagcaatttatctgtaaactgtacaa

SEQ ID NO: 13976 - DNA, 764 bp, Homo sapiens
ccccgctgccgtgtcccctgcggccggccagccgcgtcccccagccccggcctcccgcggacccatgcccgcccgtatcggctactacgagatcgaccgcaccatcggcaagggcaacttcgcggtggtcaagcgggccacgcacctcgtcaccaaggccaaggttgctatcaagatcatagataagacccagctggatgaagaaaacttgaagaagattttccgggaagttcaaattatgaagatgctttgccacccccatatcatcaggctctaccaggttatggagacagaacggatgatttatctggtgacagaatatgctagtggaggggaaatatttgaccacctggtggcccatggtagaatggcagaaaaggaggcacgtcggaagttcaaacagatcgtcacagctgtctatttttgtcactgtcggaacattgttcatcgtgatttaaaagctgaaaatttacttctggatgccaatctgaatatcaaaatagcaggtgaaaaatgttctaaaactgattgtggtcatcgtcgcacaactctgtgaatgcgctaaaagccgctgggcattacactttcaatgcgtgaattgtatgggatatggaatacaagaaatatgttatggccaggtgcagcggctcatgcctgtaatcccagcgcttcggaaggccgaggtgggaggatcatgtgagctcaggagttcgagaccagcctgggcaacacagcaagaccctgtctctattttattctatgtt

SEQ ID NO: 13977 - DNA, 26850 bp, Homo sapiens
ggaggtggtagagtgcagcttcaacatttgtgtggtctctttgctcaagccagatggcatgttccaccccacatggaagtaacagaagactacccagaaaatgtcatttctgtaagcaccattggaagtcccctaagtgacagcaataaccataagaactttttctttcctccctccttcttccttgtcccctgccttcatattgcaactctgatagtattcacaaggcacaaagcctgctcgtacctgccaagaactgtttactgaaaaggaattggagatgtgggatgacagtgatcctagctagtctggccatggacctctggcatggacttttcctttccaggagaatgaatacctcttgtactgtttgctgtgtgcttcttccacccccttgtaccaacaaagagatattgaaaaagagaatatgggattcgggccagggacagatgcaaatatccattgtttacagaaccttgttgagagatgcctaactcacagagaacggcagtgaccatcaggcatgctgtactgttcatttggcctcagttccgttagccctggtccttagctccatgcatgcccccttgtgggagttgattttcttattatccggggagggggtttcaccagaatccagcatgtattttcccagaaatacaggtgttcttcaagattatatgttttttcctttgagggaagttgaaataaaatggttttcatgggcttttggggaactttgggtgtctttatccaatggttattaaaacattaatggcttactctttggcaagttcacataacactgattactctacagtctgttaactgattttagctgaaaggggcaagatagttaagaatgaaatgagaccattttttaagaacctgccagttgctggctaggactctcatcctatccccagtagctctgtgtgagagctgctattcagaaagcagctggtcctatgtggaaagaaaaccatggcaaacaggggtgttggcaggtgggccagctccttctacagcttggccaatagaaggaaaattctggtaacttttttttttccttgatgctgttgtttctatagtttgctgataagagggtatataaggttacaaatgggccctactgggtcatgaagaaatgagaaatcaggaaatttactgcctttctaccttaaaagagacagcaatattttatcttctttgtcttagactttccttcctccaggtctaccttctttcttctttagaccaacatttcaagggtataatgcccatcagttttgatgtaataaaaaaggtgtagtgcctcttttattcatgcctccagaagagcagcagcggtggaggaagtcatccaccagacaaagagggacaatatcttattgatggtattaactaagtgctgggtctgaaagatcttccgaataaaagccatcagtttgggaactcttcgtcttgtgagactcttctgtttttattttttgccttgctttttccctccctaactaaacatttcatgtggttttatttcttcatcctccacagaatgttggttccccaaggacaacatcagtttttcttctctgatgattgagttatagtcaccaagcgagagggaaagggtggttttggaattcatttatcctcaaatggaaggatcagttttctgtgacctgtagtgaagaaagtctcaaacctggggcctgtgagatcgagagacatgcacagagtccttctgaatatctccccaggttcatctctaggaatagtccttagggctcatttcctctgacttgtattttggaaatttggagggaaaagatgaataaattaacatggagaaaataaattcttctaccgagtagaatgaagcaaggaaaagtgatctcatctttgtgagctagatctactttctctcttctcttcaatggctattcttaggttcaaaattcagccacttcattgtcaagccaacttctgttggccagttagacgtgtctcacttccatccaggcagggatctgtttgccatcaagccttcgtgagctctggcactatttcattgagtgctttggattaacttctaatgcttcttgtggaggaatattcctgtctgtcttttttactatgaaatgtgctcctgcttgttgcaggtacttggcaaataggtccaaaagacatacactggccatgaccaaccctacagctgagatcccaccggacctacaacggcagctaggacagcagcctttccgttcccgggtctggcctcctcacctggtacctgatcagcatcggtgagtagccacatgagctgtgcgagctccttgaggctcatcggacaggcacccttctgattagtctcacagcgacggtgactagcatcgtggctttaaatagaagccagctgtcatcctgaactcacatcttctcagctccttgcagtaagcaatgcacagggcaaaggttttttactgcgccctggagcaatgcgagattcctctctcccattaccttgcagacctgtttattgtctgcatttgattcccatgattctagatgttgattcatagataaaattgaacttgagacctgcaagaaagtgaaactctcagaaggccacctggaaacaggaagatttttagccatatcgatagacttgacctttaataatccatcaccttcaaaagaatgagcatttcatatcgtgttaccattgaaccgccagcctggaaatgaagacaaagccccttctgaatagtagagcagagatcctcttgagcgatgtatttaagaggtcattctttcaatattctgatggcaaaaatcttttgctaggttcggttatggttataatccattctcttgaagaaataaaagcaagtttaaccttcctgaccaagaaaacttcattgactccaagtaagcctggaagcagctgcggaatgacactttgctagttgaagaagatgattatcttctgtgactatcttgatgactaaaaatctcagtcttggccactccgaagctatccccaagctcatggcccacacgttcaaagccaccaccagttactagagcgtattttatttctgtcttttggggaggacactgaaaagcagccttgggaaggttgaaaagcaatcagattccaaggaaactaggtttatatatgtggtgttatgaaatcttgcagccagcttgcactggcaagcttgacacattttttttactgaggctggttacccatttggcatcaacataatcagcagaggcaagtgaactctgagcagagtgggacataattagtgccacgttggaaccctaaaagaaggaagataagctttcataaatgactatgagtaacttggtaaaaatggtctgtcaggagtagcaagaatgacaattctcaaataaaactctgatggcacagaaagacaggctttttctaatgaaagtctctcaggacttacagtgttcgtacacactaaagagcactttgaggccaggcacggtggttcacgcctgcaatcccagcactttgggaggccgaggcgggtggatcacaaggtcaggagttcgagaccagcctggccaatatggtgaaaccccatctctactaaaaatacaaaaattagccgggtgtggcggtgggcgtctgtagtcccagctactcgggaagctaaggcaggagaattgcttgaacccgggaggcagacgttgcagtgagccgagatcatgccactgcactccagcctgggcaacagagtgagactccgtctcaataaataaataaataaagagcactttgagtgattactggagacctgccttctcctcccctatacgtttcctgtgatttctcataacttcaagctctacactggtatctaatacaccctttattccttcttttctccttgtctccttcttcccttcctccacagcctgacacttaatgtttcagcccttgtctgagtctgttgtttagctgaagtcctttaggtatccttgttgaatgctaggtgttcctcaggaggtcttcttatgaggggaacatgaagatcgtcacatttccagagtcaggctttatcacagaccctatattctgttgacatttgttactcaaggaggtccacactggaccacagctctgtctgtgtgatatccaccctgcctagagtcattgtcaaggccttgcctgctggaaatctatctgctgtctgttttcatgtgaacctttttggtgttttgagggttgcctgtggccaagcctatttgaattggaagaaaatgatgttttatgagtggcaaattgcataagatggggcatttgtgcaaacccagcatgtcttgatgggatcactatacaaatatgcagcaaaagagattaaagccagtcttcaggggaaatgagaaactttccaaggctataaaacatggaatacgggtggcctgcatgggttcttgaattcctttcattttctggaggaaatgattaaagaacagtatatatagctatccttctggggtagaagagatgaagttcaacatggaaacagaagagtggtctaatcaaccttttcatttctggaaatgtgtaatttaaggttaaaaatgttttaaaaagtgtaactaaaaaatttttttaaactaacacaagatagattttatccaggtgggaaaccaagtccctccttgaagagtatagtgtgggagtatcagcctaatgcgaggccatcctgaatttgagtgtgattgcaaataaaaataaaatcaagcacaattgatacttatcagtgcttctcaaatgagcaactgcatcagaaccgttcctctgaggttactgtgctggactgacctgggtatcagtctcttcacaacctgagcttctgaaaaagtcatgaaatacctggacctgggattttctgtgatgggagagaattatttttgtgcagaaagactgtattgctacttgaagaacatggctttctgaggggatcagaaacatgtccatttcagaaaacattgaaagcataggaatcaaattttaggagaaaatagtacttacttgcttctacttcaacctgaagtagaaacagaaatgacaagttataaggaaatgcttctcaacacagccttcatgatccctgttcctggattgtggcccgccaaattcatttgttttttgtgttgctgaaccaaatacatgttcgtgctcatttcattagctcactgctgggtcaagcctcaggtagagtctgaaacaaaagccatcattagcaaagacagggtaaaaggctttcacctgctgccagaactctctggatacctctgcacggtcattagattcctcctggtcccgcgctgtctgcattgtatttgaactcgcttgttaacctgcttcctgagctgtggttctgcttcagtcccaaatgaatcactggcaaggtagcacatcatttcatccaaagttcagtgtaatggcatctctgccctggacatgaaaccctgatcctttccatctgctactggaatgctgctgccttggcagtcttttatctgcttacctcagcccataaacatctctttctgatcatcaggtcacaagagtaggtgttagcttctaaccccgatgctgtcttaggcattccttatcaatagcttgttctttctttctgtaagattctggctgtgttccagttgagcagtggggtctttgaaggtaatccatatgattcctctttcattaggaggttgggtgagtgctgctgctctgagaagttgattttcacagtaggtgaccttatttgttgaccaggtacgtgcaggatctcaaggcccacattccttaagaatttgttgtctccatcccaggatcagaagtcttcattttcccccaccccaatcgccaccttctattttctgtcacagaacctatgagttctaggccagacctttgaccacaaaactgactgttgtttccctctggccatacggagatcattgctcagggaaaactttggctcaaatggtgaatttaaggtttctaaaggcactagatagacatatgattataaaagcaagagcttctgtacagtctggcctggaggatattgagaagcttttctctctggcctagtgtatttataagaactggatgtacttgatctcgggacctcaccaggcttggaaagtaagccaaccgaaggtaagtagaaatggaagatgtacacctggagccctctaaagggaagcaggctagggaaacgactgatgtctggaaatggcatgaaagtggcataatatgcagggctacctgggcagccagccgtctttatgttcatctggaacagcagtccctgtgtgatttggtcaaagcccctgagtcctagcctctaaccttctcttcccatatattcagctctacctacaaggactccaacactctgcacctccctacggagcgtttctcccctgtgcgccggttctcagatggggctgcgagcatccaggccttcaaagctcacctggaaaaaatgggcaacaacagcagcatcaaacagctgcagcaggtaatggaagaggtggcaggcatccctggaggagcatgggtgacagaggccaggattgcaggaggactggggtggtaaacgtaccccttttatgtcagcaacattgcagttttataggttaaaaaagtatagctttctgggccgggcgcagtggatcccgcctataatcccagcactttgggaggccaacgtgggaggattgcttgagccctgaagttctagaccagcctaggcaacgtggcaaaccctttctcccccaaaagattaaaaattagcatagtcccagctactcctgaggctgagatgggaggatcacttgaacctgggaggtagaggttgtagtaagctaagatcacacccctgcactccatcctggcaacagaacgagactctgtcttaaaagaaaaagaaagtatagctttctaatgcactttctttactttgtgttatgtacagccctccccaggatcaaacttccttcccctgtgaagggactaaatttttctcctgtctctagttcattggaaaggaatttctgggcttgggtttctgtgggaaccaccagagaaggtgctactttttttttttttttttgagaccaagtcttgctctgtcacccaggctggagtgcagtggcacaatctcagctcactgcatcgtccgcctcctgggttctagagattctcctgcctcagcatcctgggtagctgggactacaggcgtgcaccaccatgccagctaatttttgtatttttagtagagacagggtttcaccatgttgaccaggctatgtctcgaacttctgacctcaggtgatccgcccgtctcggcctcccaaagtgctaggattacaggcgtgagccaccttgcgcgcctggcactctgcgcatgatttaggatgctgggtcttgattaaacctgctgtacattgttaccacctggcattctctccaggtggtatggaacggcactctcagaggaaggaaatgtacctctatatgtttctgtactataaagattctataaagagccaatttcctttctgccttcctgatgaccaagcttccaatggcgtgtgctttgtacacagatttcacattggacacttgtactcatacaaaggccatccttgatgttttccattcattcatacagaacaggatgtgaatctatttagtgcaccagatacttaggtaaatgagttaattgctcatcaaggacactgttctcttgcggctctttctgcccatgagagcttggaggcagatctgcatctgctgaaatcactgcatgaggcgggtctggctgcatcccatctgtattaactactttcccttcaggagtgtgagcagctgcagaagatgtacggggggcagattgatgaaagaaccctggagaagacccagcagcagcatatgttataccagcaggagcagcaccatcaaattctccagcaacaaattcaagtaggccctcactctttgctttctccaacttgtttggagtttgctttcaggctgatttgcctgtgcattttggaggagaccactcagtgcaaagtggatttgaggtctgtttatggttgacatgtttgagtaaaggtaatcagaccttctggtgaacaacaaaagcataaatctgagacacagatagttctttctgtttcttcccttcctgagaatagctctgagtaatcttcaagctcacaataatttttttcctttccccatatatgttttaggactctatctgtcctcctcagccatctccacctcttcaggctgcatgtgaaaatcagccagccctccttacccatcagctccagaggtatgagtcattttgtgttgtgcctaagccattgtctcgatagcctggtacccttggcttgactcactgggagatatggactgacttgagcattcatcttgcaagaatctatttgaaaaggagagaaaccactgtaaatttcaggagccttcttgaaatcccaacttcctgtgccacttcatttccttagccccatgagcaaagtaatctgatatctaatacaggagccagacataggcccacaatgaactctgccattttggctgagttcttttcaaacaagatgtagataggttttaaatacactgtggtggatggcttatgtatatttttctaacatgaggcttatcaaagtaaaaaaaaatagtttccactgatatatgttgtatggctgaaacttaagattgtactgtcaccttaggaagcttctttgtgtatctcttttgttatttttaaggttaaggattcagccttcaagcccaccccccaaccaccccaacaaccatctcttcaggcagcccagtaatagtcctccccccatgagcagtgccatgatccagcctcacggtgagtggagaggttcagaccaaacagttcattttatgccacatgggaaaaaatgatggtctcagttttgagcaccataaaccatttgaaaggcagaataacatagtattcaggggtatggactctagagccaagctgctttggtttgcatcctggttccatcagtttcttagctgtaaacccttgggtaagttaacttgacttcttgaattagtccatttcacactgctctaaagaactgactgagactgggtaattgataaaggaaagaggtttaattgactcacagttccacatggctggggaggcctcagaaaacttacaaccatggcagaaggagaagcaaggctcatcttccatggtggcaggagagagattgcacaggggaaagcgccagaaacttatcagacaaccagatctcaagaattccctcattatcatgagaacagcatggaggaaactgccccgtgatccagtcgcctcccaccaggtccctcccttgacacatggggactacacttcaagatgtgggtacacacagagccaaaccatattacttctcaaatgtcaactgaggataattatggtacagtatgtagatatacgtaaaacacttggaacagtctctggcacaaaatagttctcaataaaggtttactattattaatatttttaacaaaacctccagccctaccaaataaaaagcagctaccagaaccttccttatagacatgcctccgtttggctgtctactatacacgtgggcccctctcttgtgggtgtacagatgggagtgaagataagtataatgtgactgtgagtcttcagaggtcagccgtcttaggatctcttgagtaacactccacgagctacgtccctagtcagtctccctaggatccttgagaagagtctgaattggcctctaggctcttcctacttaaagtggggtcccccagccaccaatattgggagaaaaagtaagatctcaggtcgtattccagacctgttagagtctgttttttttttttttgagatggagtctccccctgtcacccaggctggagtgcagtggtatgatctcggctcactgcaacctccacctccgggttcaaatgattctcctgcctcagcctcccaagtagctgggattacaggcgcccgccaccacacccagctaatttttgtatttttagtagagacagggtttcgccatggtggccaggctggtctcgaactcctgacctcatgatccgcccacctcggcctcccaagtgctgggattacaggtgtgagccaccacgcccggcctagagtctgcatttttaaccagatgccaggccatttgtgtgcatgtgaaagttcaagaagcactgcctagatccgagttaccccatgtaatccatggaccagcttttaagggaacttgttggaaacacaaattcttaggggcccatcctgacctactgaatcagagtttgaaacagaattatatagataggacccaggaatcttctgtttaacaagttctccagacttgtcctatgctcagtgcagtttgagaagcactgttctagctggtatgtcgtctgagtattctcattagctctcattacttctggctggctggtggcctgggcacttggtcactctgaggttcctttctctccaggggctgcatcttcttcccagtttcaaggcttaccttcccgcagtgcaatctttcagcagcaacctgagaactgttcctctcctcccaacgtggcactaacctgcttgggtatgcagcagcctgctcagtcacagcaggtcaccatccaagtccaagagcctgttgacatgctcagcaacatgccaggcacagctgcaggctccagtgggcgcggcatctccatcagccccagtgctggtcagatgcagatgcagcaccgtaccaacctgatggccaccctcagctatgggcaccgtcccttgtccaagcagctgagtgctgacagtgcagaggctcacaggtaagaccgcctaacgtcacccagccatctatgcatgggatccaggtgggaggaagccccttagcagagtgagagaaaaggagggaaggagaatgggtctgactaggctgtgctcttgtttcacgctttctaaaatcaggatgctgggtttggaatgaacttgtcagctttttattgacccagggttaaaattctaatgagactgaggtggaaaatgggaaagctaccttattatttgctaccttattatttgcttgcaaagaagaaaatggcctgttagaggaatgtataaaaattccagttccccttttcttgaagggagcatcttgaagttgcttccttcaaaatgagctagatctattacccacgcagtgccctcagtcccttggaggttactggacaagccagtaatggaataaatagggacaatgcatacatctgccacttctctgtcacaccacagttctctgtaccagtgggttctccctactgaggaggaggagctgttcccaggaagtctagtacttgttacatggatgtctggtactcccttttgtgtctgcagcttgaacgtgaatcggttctcccctgctaactacgaccaggcgcatttacacccccatctgttttcggaccagtcccggggttcccccagcagctacagcccttcaacaggagtggggttctctccaacccaagccctgaaagtccctccacttgaccaattccccaccttccctcccagtgcacatcagcagccgccacactataccacgtcggcactacagcaggccctgctgtctcccacgccgccagactatacaagacaccagcaggtaccccacatccttcaaggactgctttctccccggcattcgctcaccggccactcggacatccggctgcccccaacagagtttgcacagctcattaaaaggcagcagcaacaacggcagcagcagcagcaacagcagcaacagcaagaataccaggaactgttcaggcacatgaaccaaggggatgcggggagtctggctcccagccttgggggacagagcatgacagagcgccaggctttatcttatcaaaatgctgactcttatcaccatcacaccagcccccagcatctgctacaaatcagggcacaagaatgtgtctcacaggcttcctcacccaccccgccccacgggtatgctcaccagccggcactgatgcattcagagagcatggaggaggactgctcgtgtgagggggccaaggatggcttccaagacagtaagagttcaagtacattgaccaaaggttgccatgacagccctctgctcttgagtaccggtggacctggggaccctgaatctttgctaggaactgtgagtcatgcccaagaattggggatacatccctatggtcatcagccaactgctgcattcagtaaaaataaggtgcccagcagaggtaagtgtctcctcacagtggaagtcctgggccagtctgccctaatcaactgactcagtaatgttatcttttttcagctagtattctgtgttcctaagaaaaaaagaatttctgagcttcacgaccttcttggggagaagcatgtaggaagtgggtattggtgggcaaggggtccattttcaaaatcaaaggaccatgatacaaaattaacacttagtcaataagatagatgatccatttcccttattcataccacagtttcttggaatccagaaattcctgactgccatccaaacagctaactttaaacttgtgcaatagaaaaaaagtcagcccaacataatttagtgtaaatagtgtgggaacaagagtcagagcaccttaattctgctcttgcagctatcataaatacgataactttgtcatttaatccctctgattctgattttcctcatctgtgaagaaggtgttggaggaacaatggagtatcttacggtgtatctgtggagatgaaaacatgtatatatgtgtttgtttctacataatgtttgcatgagagagagaggcacattcagatcatctgaaatgtttgagttcagtgcataaatgtgaggtattattactctggtcgttttattagtgagctaaatgcagaatattacagcatcataagggcccccattatcatttcattttgtaccactttataattaatgagtatattcattatcattctgaaggagatcaggattgcaattagtaagttatacttagaaaatatagttccattagcatcacggcattcatcctagacaaaatcaggaatcttgcaatttaccactcctcaccattgccatccaagggaataaaaagcaatttatctgtaaactgtacaaccctgagactgagcagtttcttccatccttccctccccggaactacctgcatctcctgccctgtcatttaaagtcagtgctgaaaactcagccccagggggaattcggtcctgcagcacagagcagtagagaaggccttgctgtaaagcggtgtctgtgaaaacgccttggtggtgccaggttgtactcattatgcgctcttaggggggaattgttgcctgaaatgccaattcaatcctgaccttttgaacagatgggtgtcatccagctgagagattggctccagtgagatgtactgtgttcacctgtggctgctgtattcttagtagacataggagggtgggagctttcagaaccagatcataggtggaatggttaacagacctgagggtgtttaggattgggaggaaaaactaagagaaacatcacgcttgttagatggaagaagggattagatttttctgggttcatattatggggcagaaccaagatcaagatagaagttgcagcaaatttcaacaccctgtggaagacctttataagaactctccagaacaggctgccttagcagcctgggagctttctaacagaggtgggataatggtatggggatgttgtggaaaagattcccctgcaaatggaagcttccagcagattagcacactatagttggcatgaaaaggagatgagctcacgtttctttttttttttttttttgagacggagtcttgctctgtcacccaggctggagtgcagtggtgcgatctcagctcactgcaagctctgcctacaatgctcacgccattctcctgcctcagcctcccgagtagctgggactacatgtgcccgccaccacgcccggctaattttttgtatttttagtagagacagggtttcaccgtgttagccaggatggtctcgatctcctgacctcgtgatccgcacgccttggcctcccaaagtgctgggattacaggcatgagccaccgcgcccggctgagctcacatgtgccaggcaccaaatgctgttcacatacggattcatttaatccttacaacaaccctacaaccctagaataaccaactcttattcccatttaccagtgaaacagcggaggcacagagattaagtaacttgtccccaaagtcaagaggtagtcaggggcagctgaacataagagtactcacactagctgtcactgacacgagagatgctcaccgagcaagtcccgggtgtgcagggcactgaggaaggagcatagctgcagcaaacagtgctgctgccctccacccctgccccaggctgagttaccgtgtactttcaatacttcctgaaatgtttttcttcaaaaattattttctctagtttctctttaccttccttcctgtgtgacttgtgtgtgtagaaagtctggagagcataattccccattgtcccctgattgtcagaggaccccttcttcggcaggcacgctagtctgttgagtacccactgttggtgcaagtgctgtgggcgcaccagaggagggagagattacttcaatccaaggaacaacgtaggtttccagcaataagtagcctgtgggttgggtcctggtggatgaagaaggtttgccatttggatctagaggagaagcaagagaaaagaacaatgggtgagactgtctcaaggaattttccaaggacagcagcaggcttggctggtttgaagtacagtgtacatgaaggcattagtagaagctaaggacagaggttttctaaaatgcatcgtctagattcagctgtactgtgaaaaaaactcaagttttttttttttttttttttttttttggcagagtctcacactgtcacccatgctggagtgcagtggcacgatctcggctcactgcaacctacccctcctgggttcaagcgattctcctgcctcagcctcctaagtagctaggattacaggtgtgcactaccgcacccggctaatttttttttgtagagacggggtttcaccatgttggccaggctggtcttgaactcctgacttcaagtgatccaaccacctcggcctcacaaagtgctgggattacaggcatgagccaccatgcctggctttcaggtttcttttaaaaactccagagcttacatttttactttactgaaaaaatcatcagataatttgctgttcacttctgtcacgaaaggcttataatgctgtgcccccaccactctgcaggcaagtgggggagctcactcttctcaacctttttgccaggaaggaatgcctgctgtttcttttaatggtccctccatctcaactgtgttgcacaagactctactgtaggtgctgtgagaatgcagagatgaaaggataacctgtcctcagggagcttctactctactaggggatgtaaaacaagctcataaacagctttgctatgaagtgctaggtactgagtgctgcaagaagtatcactgagaagagcagagctagtgtgatcttcttagcatttcttaagggtagatgaacagggattgttggtgttatttagttactttttgagtcagggtcttgctctgtcacctaggctagagtgcagtggtgcaaccacggttcactgcagcctcgacctcctgggctcaagcagtcctcccacctcaacctcctgagcagctgggactacaggcgcgtgccactacacccagctaattttttttttcctttggtatagatggggtcttgctatgtcgccggggctgatcttgaactcctgggctcaaacaatcctcccttcttggcctcccaaaatgctggtattacaggcatgagccaccacacccagccatattggtattagtaaaggaaaattagatgccatcatatcagtgtccatggttacctatttccttgatggcgatttgccaccagccagtatgaggccaggcactgtgagagcactaagcaggcagcatgccaaaggtttcttcccaatttgtagaagtgtcaggatttcacatgccccatgctgtccgtaatctccctgcctgccaccctagaaggaaaaacaaggtttgtctttcttctatagtggtacacacacttgatctttttgactttgcaaataaacacagcagcataaccaatctacaccatgagattaccaactggaactcacaaagaaaaccacatcctcttctctgagctcagtcagcctcagctttattactcaggcctcatagagcagtaaaatgctgacagagtgggaggggttaccccagaacctttaaggggagtatgcagtcacgttattgctcccattttctctcaaaacccagtaagtgagtcaggacgagtcaacattgacagattcaatagagaattgtgcaggttgccccaaagttccccgggaaggtgggtggcgtgcattgtgtccatttgtgcacttttccccttgtgtgatcggacgatcatcccacctctgcactctcttagctttagtttgataaatattcgagcatgtagctcttgggaaccatctttcctccatgactttggtagctgctgaattggcataaagggttgccaaagatttgatcctgaatgtcatgttccttgggcagtgggttagtctgtttgtaccccccaaaatggtcgatagggtcttatttatagagtgtcacaaaggacttctagactcagggtcagcattcttaccaaaaatcagacttgacttatttggtcttttacagttgattaaagactctttcacatgtgttgtcttttcgagcccccaaacaaccgtcatttttcagatcaggaaccttgaggagaagctgaaagatttgccaacactttgctggtgagggagctgggtcctgacttcaagttttctgatcccctggtcatgtattttttcctttacgcctccttgcccactctgcaccctccaagcacagctgccaagtgaaagatgctagcccttccaggtctttgacctactgatgatactgaaacttgagcagacagagccctggggtatcccctgactcctattaatactctttttcatctggcttttaactgacatttgtctgtcctgaatcagaggcttctcctggaaattaaagtttccctgagtcatttgttcatttacatatgggtatattgtccctcataattctgcaagcagggttctgtgattaaatcaatttccttgtttgtttttgtcagctgactcagcacgtccttatgcactcagaaataacatctctaaactgaatataaatcatgctagactttattgagcctttacagtgtagtaacctctatgaagcactccacacccatggagtcagtccagttgtacagataactaagacccagcaaagcaagataacttgcccgagctcctgctcctcaggaagcagctaagccaggattcacggccaactcttcctgaccccagaacttgtgctcatgacccttgtgctcaactccagcttggctgagggatgagctctgggctgggagtcaggaaggccccctacatgatttgtcaggtggttgcttgctctgtcttggtgcctacaggcatcagacctgaaggcggggaagacagcagacaaggcagagcccaaaggagggtgggtgttttggtttgcagaggccccattctcagggataaaaacaagtctgagagagggaaggaaaagagccttaaaagacacagcaaacaaaccaaaacactgaggcctccagaagaggcaggaaggctccaaccaggactatatacattttgttagctttgctgtttcctcatggttagtaatgatgttttaaaaatctttaaacaggagagcgctcatgtttgtccttgcggagagcaaagagatgcaactgatgagatttgcatccaactatataatcaggcttaaaggaaaaaagcaccccgaggaattgagtggatgatgttagttatcaaagaagacaatataggtttttgaaaaagtaagaagcggctgctcgcattgcttcttggcaaagcagacagaatcaccatttcctcactcccacacaaccatgttgccccacttcctgccagtggtttttggttggccctggcgccaacatgcgagcagtgcccactgagaggaattgggcagagtgggtaggacgggcgggctaatcccacagagcaagtcctggtgtaggttttcttttatcttctctctgctggcttttagctttctgtagcaaaatagttggcttctggctgttccttttacctctttgctcagagaactttcaaaagatttctcacttgccatcatctttggtagctgggaagctccctcctctaatttttctccagaatgtcttgcattactagcaatgggcatgtcagttagctcccctccctttccatcctgcctctgcccctaagtcccagcctaaccttaatcattatagaaaaccattgaaatacagagacctgaaatcctttacccaacattcaagaagtatgctttactttcattatttaaatagatcattggaatggcacagttagcattacagctgtgtttgctattaagagcttttgttttaaacttagtcccaccaagagtcagttcatccaagataagctcagtagtttccaagaagctttaactcagaaaaccaaccaagcaaacacaacttattttcaagtcccaggcttttaaagactgaagtcaaaagtgctaccaggaggatcctgtcaacataggtgtggctttgatagtcttcttgactatccttgatcaagaagaagtactcattcctttttctctccaattctagtccatagaatggtatgctctgacaggatagtaacccatattaagagagtatttatttttattattcttttttgagatagagtctcactctgttgcccaggctggagtgcagtggcatggtcttggctcactgcaatctctgccttctgagttcaagcaattcccctgcctcagcctcctgagtagctgggactacaggtgcacaccaccacacccagctaatttttgtaattttagtagaggtggggtttcaccatgttggccaggctggtctcaaactcctgacctcaggtgatccacccgccccggcctcccaaaatgctgggattacacgcacccggcctaaagagcatttactgacatcagtgaaagagatcataatactgggtataggacaatgttctagaacactgaagattcacagacatacatgagatatagttcttgcctgcaaagaatttatagtctaatgtgaatgattaagtacataattgaacatggtaccaaggataatgttagagcaatcagagacaaagtcttttgaagtttaaaggaagagatgatctatttctgtttgaaaggaaaagtttaataaaaacaatagcatatgataatggatgtagaatgatgagttgctttggattggcaggagtgaaggcagaagaatcagttatttgcagatagaaggaacagtgagggcaaatgcatagaattgtgcatagatggggaacagttaagtggtcccatttgactagagcttagaatgtatggagaggggaatatgagacactgattggaagatagcccagggcagtgttgtaaaatgaaagtgaatggactacagaacggttggtctttgtagggtagtagtaggggattggttatgaggctagcataataatccaggcaagaggtaatcaggtttccatgagattggcaacaaagggactgaagtgaccagcattgcagagttagattcagcaccaggagtaaggaatcaatagtggccccaagagcttatgcctggaagatttggaaaatgaggcatcaaaacgacaatgtctgaaggagtagcaggttatgggggaagtggatgggtttggaattggacatggtaagtgttacatgctggttagatatccagggaaagatacctagtaagtagctggaagtatggatctggggcttaaaggagcacttcagtaattctttacataaaggcagtacagccatgaaaatagatgatgttgccagagtaagtgtggggagagagaaggtcaaggacaaaaatgtggagagtacttgcttagaaagggtggaggggccatcaaaggagtcagaagcagcagttagagaagtagaaagaggagagtagcagcgtggtacactgaggtcaccgggggaggagagaggacgcagccagccacagaacagatgcatcctctagggctagagggtcctgaaagctccgagagtaattctcatgtgcatttaggtttgggaatagatcactgttaattcaacagagaaatgaaagaagagaaggttcggtggggtccagccatgccctgttacgtggaattttttccctaagggtgtggtcccctcccctacagctcgtcttttggagggctggtccaggctcctctaagccatgacgccggctgaggatcagcggttggtgtacatgatctcctcagccttgcccattgtcccttgcaagacatttcttggatgggagtttccagtgctgggagaagttccgccccactgactctattctgctgtgtctcctcagagcctgtcatagggaactgcatggatagaagttctccaggacaagcagtggagctgccggatcacaatgggctcgggtacccagcacgcccctccgtccatgagcaccacaggccccgggccctccagagacaccacacgatccagaacagcgacgatgcttatgtatgttggtcccacctgctgcacagaggtggatcctcccagtcccagccttgaaacagagtatagtgatgtggggtagcctctcttggccgctctcctcagtcagcattcagcctttctggaaacggtggggagcatttctttttttttcttttttgagatggagtctcactctgtcgcccaggcgggaggacagtggcgcgatatcagctcactgcaacttctacctccccagttcaagtgacttttgtgcctcagcttcctgagtagctgggactacaggtgcctgccaccacacctggctaatttttgtatttttagtaggcatggggttttaccatgttggctaggctggtctcgaattcctgagctcaggcaattcgcctaccttaagagcattttctttgagtcaccctaacagaccaaaccttaattcaagtagaatctatgctccaaattttagaccaaagaatcagaaatagttgccatctgttccctgtagttttggttattaaacctcttctcagtctaaactcaggccccagcaaatgagcccataggcttctggttatttttcagcagctacattgagcttactcagatcaggggagctggtgggcctcagcaaagttttgttttcctagggtggtgctagtctagtagctagccacatgtggctattcaaatctaaaccaattaaaattaaaaacaatttaaaattcagttcctcagtcacaccagttacactttattttttattattattattttttgagacagagtcttgctctgtcacccaggttggagtgcagtggcgcaatctcggctcactgcaagctccgcctcccgggttcacgccattctcctgcctcaacctcccgagtagctgggactacaggcgcccgccacccttttttgtatttttagtagagctaaatttttttagcccagctaatttttcgtatttttagtagagacggggtttcaccgtgttagccaggatggtctcgatctcctgacctcatgatccaccagcctcagcctcccaaagtgctgggattacaggcatgagccaccgtgcccagcccagtcacactttaagtgctcagtagccacttgtggctactggttaccatattggacaggacagagaacatttccatcactgcagagtgtgactggacggtgctgtcctaagacaaagtcccagtggagatggggataggtcagaaacctggttttagaaggccatgtaggtatcaagatgtcaccaccagctgagatttgccacatccgccccaccctcagcccccccactgggcagagccaagcagcttcccacactgtcgctgtggagcaccccctttgggtggtgctttagaggaaggagtctggagtggggccccgggctgtcttttgcctgggctccttcagaaggaccagctgtctctaggggttgcctgagagtggtgtcttgtgtgcttatttcttctcttaactgttttctgcaggtacagctggataacttgccaggaatgagtctcgtggctgggaaagcacttagctctgcccggatgtcggatgcagttctcagtcagtcttcgctcatgggcagccagcagtttcaggatggggaaaatgagggtgaggagccttatgcatggggcactccagagaagttcctggaggggcctccctccatcttccgtaactgctcctctcttcgtaggaagagctcatggggaggtagagccacagcatcccacaggttctggacacagcccctttccccactggtcttccctgagtgtgggtgtgtaaaggaggtgtggcttctggccagatggcacagggctctcccattcctgtctctcatctctgtgatgatatgccttcaatcactttttccagttctgcttagagggcatcaggtcctaatggcacatttctacctcttcttggagccagtcaagggagggtgtcataacaaataataggcgtaggccttgggcggggcaggtctgccaccagtcccaaggctgtccttttcaggctctgcaggtgaggcacttggctttctggaccccgagatcctcatctgtaaagtggcaaaaacgatagagcctttatcctacattgtgccctgagggctggctggcttagtgagtatcaagtgcttagcacagtgtctggaagacagacagtgcccaggaatgggtgcctgcaggcagtaaaattattctccctttcactctttaagaggtgatcctttctgaaggagtcctctatcttctctcacactacagtagttgatcttacctaaggatgggaaagggtaaaggaaaagggaaaaaagcagaacaggtagaggagaatataggaagaatcttggcccccgcccatcgtcactcaacaccttgagggcctgctgtgagctagaattcagggctgggagtcaggctgtgggatgctcgacaggttgccttcaattcctcctctctctcccccttgctctcctagtcccccagttccctgccaacctcatacgttctttttggtcttgcagaatgtggggcaagcctgggaggtcatgagcacccagacctgagtgatggcagccagcatttaaactcctcttgctatccatctacgtgtattacagacattctgctcagctacaagcaccccgaagtctccttcagcatggagcaggcaggcgtgtaacaagaaacagagagtgagtgtcaccctggccagagccaaaccagccctgtggcccagtgcctgctcccaatcccatcaggagcttcagcccatgtgttgtggtggccagtgcagtcgacagtaccacgcctcccctcgtggccttcacagtttcttgcttttcattaacgacgctgctagttttagggcgcgaggtaggggtgggggtgtgcagaagaaatgctaaacacagtctcttggttcggttatgggaataagacacaagactcgccgtgtgttacaggtgctctagccttcatagcgacagaagtgagctacggctccagaggatgcaggtgacctccggtcagcataatgaggaaaggaggaagtccttaaactcagtcctaaaagacaaaacctggcaggaaaatatgtccagccatattttttaaggccatacagaagcaagtggcaggatattccagattagggaaatgtgtgatgagaggcccatggtagaaagaatggggaaattggcttgtttggctggagtaatgcaaagagtacacagcaggcaccattggttgtatctggaaaatccttgacagaagaggcctgatgaaagggaagccacttggcaaatccacatcagagcctcagtatggcaagctacctgaacacctgagggaaagtaaacccgttgcattttttaaaaggttttaaatggaatatttgagcctttctcttttcaaactaattctcctctgtgtctgctttattccaggttttgtgtacagcttgggaatgaaaaggttgattgtaaacccacagtatctagcagcgttgtgccaaattgcccttgtgtttctctccacccaaaatatcacagctgctttcctcacatttggttcatccgtgtgctgttcttttgggttctgagagggttttgccatgtttgcttgtatgaccaagtcaccaaggaaataaacaggaaggaaatccatgttctccatcttttgtgaaagtatatttgagttggtggttttttgttttgtttgggggtttgtgttttgttttgtttttggtatgttttcttccagaggtgatatactttcttttttttcttcctttcttttttttctttcgttccttttttgaaacaggagagcaaagcagttagagttcagaggccagcggcctcagggccactccctccctagccttcatcagcagagcaccctccatccccctgcattgctcttctgtgaaagcaaatactaaaggatgccatcctctggaatcctaatggcaggcaaagggagagaggaagggtgacggcttctggcacttagaaaacaaaaagaacaaaaaaagagaaacccccaagcctggaacgcagagaggtctttactgctgggatccacggaaaacatgtctgtcctagccaagatcatatgaagagtttggcacggaggctgagaatgacctggcatagatggtttgccagttaggatgtctcaatttgagcctttgcttttggtggataactcagctcccctcttgtaacctggaaagttggttgcctttatcatcctgctggttttatccatggactgaacacccaacagcagtgcactatgctttctatggcatctttcattctcattttatattgtgctataaaaaggattgtttctccatatatatattatatatgtgtgtatatatataatataatatatgtgtatatatatattatatatataatatataatataatatattatatatatattatatatataatatatatataaaatatatatatatatgctctcctctttcagcctctttgtcacagggaagaagtgtaggaggttgccttgggccctgcctctctcctaacctcctcttccccactgggtaccctcagcccctatattttaattcttgatcatgtagaaattgtttttggtaaatgttgatattattgttattatcattattaataaataaagagaaaaggaatttttgtttaaatgagaaatgtttaaccagattctgttctatttgaattgtgacttgcaccttttgttcaaagtatttcctttaggcattgtaattgtgaacagctcttacttgtgccagtgacagatgcagtggtctcctttccccagttgaagcagtgcatacgcagtagctattatttgtgttatctttatttctcttcattgttagaaaccaaagtcttctctgctggctggggctgagagagggtctgggttatctccttctgatcttcaaaacaagagagagaccttgaatacactgactcttccaccctttttttttctgggaaaggagagcaagaggtcccgagtcccctcctagtctttcatcctgaatttgcacagaggaaagcgggtgcccggcatggccatcctgatgttgctggcgggatccccatgcaccttgtccttctccactgatactggcagctcggctcctggacccaagatcccttgagtggaattctgcagtgcaagagcccttcgtgggagctgtcccatgtttccatggtccccagtctcccctccacttggtggggtcaccaactactcaccagaagggggcttaccaagaaagccctaaaaagctgttgacttatctgcgcttgttccaactcttatgcccccaacctgccctaccaccaccacgcgctcagcctgatgtgtttacatggtactgtatgtatgggagagcagactgcaccctccagcaacaacagatgaaagccagtgagcctactaaccgtgccatcttgcaaactacactttaaaaaaaactcattgctttgtattgtagtaaccaatatgtgcagtatacgttgaatgtatatgaacatactttcctatttctgttctttgaaaatgtcagaaatatttttttctttctcattttatgttgaactaaaaaggattaaaaaaaaaatctccagactcaagttgctaa

SEQ ID NO: 13978 - DNA, 4220 bp, Homo sapiens
ggaggtggtagagtgcagcttcaacatttgtgtggtctctttgctcaagccagatggcatgttccaccccacatggaagtaacagaagactacccagaaaatgtcatttctctctacctacaaggactccaacactctgcacctccctacggagcgtttctcccctgtgcgccggttctcagatggggctgcgagcatccaggccttcaaagctcacctggaaaaaatgggcaacaacagcagcatcaaacagctgcagcaggagtgtgagcagctgcagaagatgtacggggggcagattgatgaaagaaccctggagaagacccagcagcagcatatgttataccagcaggagcagcaccatcaaattctccagcaacaaattcaagactctatctgtcctcctcagccatctccacctcttcaggctgcatgtgaaaatcagccagccctccttacccatcagctccagaggggctgcatcttcttcccagtttcaaggcttaccttcccgcagtgcaatctttcagcagcaacctgagaactgttcctctcctcccaacgtggcactaacctgcttgggtatgcagcagcctgctcagtcacagcaggtcaccatccaagtccaagagcctgttgacatgctcagcaacatgccaggcacagctgcaggctccagtgggcgcggcatctccatcagccccagtgctggtcagatgcagatgcagcaccgtaccaacctgatggccaccctcagctatgggcaccgtcccttgtccaagcagctgagtgctgacagtgcagaggctcacagtgcacatcagcagccgccacactataccacgtcggcactacagcaggccctgctgtctcccacgccgccagactatacaagacaccagcaggtaccccacatccttcaaggactgctttctccccggcattcgctcaccggccactcggacatccggctgcccccaacagagtttgcacagctcattaaaaggcagcagcaacaacggcagcagcagcagcaacagcagcaacagcaagaataccaggaactgttcaggcacatgaaccaaggggatgcggggagtctggctcccagccttgggggacagagcatgacagagcgccaggctttatcttatcaaaatgctgactcttatcaccatcacaccagcccccagcatctgctacaaatcagggcacaagaatgtgtctcacaggcttcctcacccaccccgccccacgggtatgctcaccagccggcactgatgcattcagagagcatggaggaggactgctcgtgtgagggggccaaggatggcttccaagacagtaagagttcaagtacattgaccaaaggttgccatgacagccctctgctcttgagtaccggtggacctggggaccctgaatctttgctaggaactgtgagtcatgcccaagaattggggatacatccctatggtcatcagccaactgctgcattcagtaaaaataaggtgcccagcagagagcctgtcatagggaactgcatggatagaagttctccaggacaagcagtggagctgccggatcacaatgggctcgggtacccagcacgcccctccgtccatgagcaccacaggccccgggccctccagagacaccacacgatccagaacagcgacgatgcttatgtacagctggataacttgccaggaatgagtctcgtggctgggaaagcacttagctctgcccggatgtcggatgcagttctcagtcagtcttcgctcatgggcagccagcagtttcaggatggggaaaatgaggaatgtggggcaagcctgggaggtcatgagcacccagacctgagtgatggcagccagcatttaaactcctcttgctatccatctacgtgtattacagacattctgctcagctacaagcaccccgaagtctccttcagcatggagcaggcaggcgtgtaacaagaaacagagagttttgtgtacagcttgggaatgaaaaggttgattgtaaacccacagtatctagcagcgttgtgccaaattgcccttgtgtttctctccacccaaaatatcacagctgctttcctcacatttggttcatccgtgtgctgttcttttgggttctgagagggttttgccatgtttgcttgtatgaccaagtcaccaaggaaataaacaggaaggaaatccatgttctccatcttttgtgaaagtatatttgagttggtggttttttgttttgtttgggggtttgtgttttgttttgtttttggtatgttttcttccagaggtgatatactttcttttttttcttcctttcttttttttctttcgttccttttttgaaacaggagagcaaagcagttagagttcagaggccagcggcctcagggccactccctccctagccttcatcagcagagcaccctccatccccctgcattgctcttctgtgaaagcaaatactaaaggatgccatcctctggaatcctaatggcaggcaaagggagagaggaagggtgacggcttctggcacttagaaaacaaaaagaacaaaaaaagagaaacccccaagcctggaacgcagagaggtctttactgctgggatccacggaaaacatgtctgtcctagccaagatcatatgaagagtttggcacggaggctgagaatgacctggcatagatggtttgccagttaggatgtctcaatttgagcctttgcttttggtggataactcagctcccctcttgtaacctggaaagttggttgcctttatcatcctgctggttttatccatggactgaacacccaacagcagtgcactatgctttctatggcatctttcattctcattttatattgtgctataaaaaggattgtttctccatatatatattatatatgtgtgtatatatataatataatatatgtgtatatatatattatatatataatatataatataatatattatatatatattatatatataatatatatataaaatatatatatatatgctctcctctttcagcctctttgtcacagggaagaagtgtaggaggttgccttgggccctgcctctctcctaacctcctcttccccactgggtaccctcagcccctatattttaattcttgatcatgtagaaattgtttttggtaaatgttgatattattgttattatcattattaataaataaagagaaaaggaatttttgtttaaatgagaaatgtttaaccagattctgttctatttgaattgtgacttgcaccttttgttcaaagtatttcctttaggcattgtaattgtgaacagctcttacttgtgccagtgacagatgcagtggtctcctttccccagttgaagcagtgcatacgcagtagctattatttgtgttatctttatttctcttcattgttagaaaccaaagtcttctctgctggctggggctgagagagggtctgggttatctccttctgatcttcaaaacaagagagagaccttgaatacactgactcttccaccctttttttttctgggaaaggagagcaagaggtcccgagtcccctcctagtctttcatcctgaatttgcacagaggaaagcgggtgcccggcatggccatcctgatgttgctggcgggatccccatgcaccttgtccttctccactgatactggcagctcggctcctggacccaagatcccttgagtggaattctgcagtgcaagagcccttcgtgggagctgtcccatgtttccatggtccccagtctcccctccacttggtggggtcaccaactactcaccagaagggggcttaccaagaaagccctaaaaagctgttgacttatctgcgcttgttccaactcttatgcccccaacctgccctaccaccaccacgcgctcagcctgatgtgtttacatggtactgtatgtatgggagagcagactgcaccctccagcaacaacagatgaaagccagtgagcctactaaccgtgccatcttgcaaactacactttaaaaaaaactcattgctttgtattgtagtaaccaatatgtgcagtatacgttgaatgtatatgaacatactttcctatttctgttctttgaaaatgtcagaaatatttttttctttctcattttatgttgaactaaaaaggattaaaaaaaaaatctccagactcaagttgctaa

SEQ ID NO: 13979 - DNA, 715 bp, Homo sapiens
gttgctatcaagatcatagataagacccagctggatgaagaaaacttgaagaagattttccgggaagttcaaattatgaagatgctttgccacccccatatcatcaggctctaccaggttatggagacagaacggatgatttatctggtgacagaatatgctagtggaggggaaatatttgaccacctggtggcccatggtagaatggcagaaaaggaggcacgtcggaagttcaaacagatcgtcacagctgtctatttttgtcactgtcggaacattgttcatcgtgatttaaaagctgaaaatttacttctggatgccaatctgaatatcaaaatagcagattttggtttcagtaacctcttcactcctgggcagctgctgaagacctggtgtggcagccctccctatgctgcacctgaactctttgaaggaaaagaatatgatgggcccaaagtggacatctggagccttggagttgtcctctacgtgcttgtgtgcggtgccctgccatttgatggaagcacactgcagaatctgcgggcccgcgtgctgagtggaaagttccgcatcccattttttatgtccacagatcattaatgattctgaagtacacttttggcagaggaacaggagcaaaagcttaatcatgtggttgcaacaaaaaaggaatagaaggaaaatagacgacacgctctttccagtttactataaa

SEQ ID NO: 13980 - DNA, 21313 bp, Homo sapiens
ggactgcgcggaacatggcgttctggggttggcgcgccgcggcagccctccggctgtggggccgggtagttgaacgggtcgaggccgggggaggcgtggggccgtttcaggcctgcggctgtcggctggtgcttggcggcagggacgatgtgagtgcggggctgagaggcagccatggggcccgcggtgagcccttggacccggcgcgccccttgcagaggcctcccagacccgaggtgcccagggcattccggaggcagccgagggcagcagctcccagtttcttcttttcgaggtattttgggcaaggacaagcacttcttgcgtgttcgttgtcgacacctcgcccactctttctcaccttgccgtgtttcctttgcggcatgtctgggagtttacgtgcgttccaacaccggggcctccgtctttatgctgatctgtggacgtcacttatgggggttttgtcgtttatttcaccattccctcattgaaatacgttctaacctttagttattgtgcatcatgctgtggtgaataaccttgttggcacctcactgtttgcataaattcctagtactgggattgctaggtccaaaagtatatgcatttaacgctttaatgatccctcataaatgttgtgcggttaatactcccactggcatgtgatcgtacccgtctccatagtaattgcatctaagaactgaggctacataggaaaaaatcttaaggtccatggttgttaggtatcagatgccctataatggatgaatatttaagtaaataatggcacattgacttgctgtctgacacaactgctgaaaatgttggtgaaaagtgagtctcgaagtggtagctcacacttgtaataccagcactttcggaggctgagacggggatcgctcgaggccaggagttcaagagcagcctgggcaacataacgagacccccatctctaccaaaaatttaaaaattagccgggcatggtggcgcaagcctgttgtcccagttactcctgagactaaggcaagaggatcccttgagtccaggagttcaaggctgcagtgagctatgattgagccactgcactccagcctgggtgacagagcaagactcttatctacctgtgggaaaaaaaaaagaaaaaagtttaatagatcctgaagagttggccgggcgcggtagctcacgcctgtaatcccagcactttgggaggatgagacgggtggataacgaggtcaggagttcgagaccagctgggccaacatggtgaaaccccatttctactgaaattacaaaaattagccgggcgtggtggcgggcgcctgtaatcctagctactcaggaggcggaggcaggagaatcacttgaacccggaaggcagaggttgcagtgagccgagatggcaccattgcactccagcccgggcgaaagagcaaaaactccgtctcaaaaaaaaacaaagatcccgaagagtcagtcgttcatccaagaagccctgactgagctcttattctgtgccagactctgttctaggtgctatggatggagcagggaccaggacctacaaacacgtggagcgcattctaatatctgtgatactctgcaaaactgttaaaacaaatccttgcggccgggcgcggtggctcacgcctgtaattccagcactttggaaggccgagacgggcggatcacgaggtcaggagatcgagaccatcctggctaacacagtgaaaccccgtctttactaaaaatacaaggaaattagccaggcgtggtggcgggtgcctgtagtcccagctactcgggaggctgaggcaggagaatggcgtgaacctgggaggcggagcttgcagtgagccgagatcgcgacactgcactccagcctgggcaacagagcgagactccgtctcaaaacaaaacaaaacaaaacaaaacaaaaatccttgctaccactggccctaaagcaggaggcatagggctgcgtgtgaggagtagtccattgcatgggcttcctccagtttggctttggatttttgagctctctgaatttgttgtttgtgtcctttgcacagtgtccctcccaggttgcacccatgcctgcccctcagggtcccccactcccagtgaatttcacaccatgcagcatgtactttaagccatacatcttacgtatgttccagacatttggtaaaacgccgtttatgtgtttttcagtgactcacaaacattttatttacgtaaatgaggaatgtactcaggcacccttcgtgataccttgccctcagcaggcactcaacagcaataataactttcattccttttgtgcttctcttaacagttcgtgtttagtaggagcacagtagctgtttggggaacgaccttaagtgaatagatgtctgaaatgctgtgtgaagtggggcgcttaataggtggtgagatggttttagaaccagggttttccctctttgcttcttgactccttaaccagttttcattaggagacccctttggaggtttgcagtcagtcagagttgagtgcctactgagtgtactgaattatgaaatgagcacagttcccattaacctgaattttttgctcccaagtaagtcttgatttctgatttatgactgctttttgttgtaccccaatagtcgtctaagaaaggtgattattttgagaggcctggggagacacacatgctcattctcgagggtggcggtggtgcagagggcagagccatgctcgttcttgctatcctgagattggttgctatctgtttcctttgctgctgtgtttttttctgtcagtattaaaggtggaagaaggtccatatctttttctgtgggtgcttcaagtgttgttggaagtggaggcagcagtgacaaggggaagctttccctgcaggatgtagctgagctgattcgggccagagcctgccagagggtggtggtcatggtgggggccggcatcagcacacccagtggcattccagacttcaggtactgcccacagtcccacctgccttctgcgctcccctcccctgactcctgccctccccactgcccagtttattccacttccctgtcctcttccaaaggcctcagagcctttcttctctccctgcagatcgccggggagtggcctgtacagcaacctccagcagtacgatctcccgtaccccgaggccatttttgaactcccattcttctttcacaaccccaagccctttttcactttggccaaggagctgtaccctggaaactacaagcccaacgtcactcactactttctccggctgcttcatgacaaggggctgcttctgcggctctacacgcagaacatcgatgggcttgagagaggtgagccctctgtgagtcgcacacattctttttctcccacggaggctcgggtgcctgtttctcccagggaggctcgggtgcctgtttctcacaggggatgctcgggtgcctgtttctggggacggccaaaacctatcgcttatgcttcttccttgggactttttttgagccaactagttagggctttgttcccaaggaaaatgtcctctgggtgtttaaaggccactgcttgttctcctgcatacctgcagagctgtgtattttgggcagaagttgacattgttttgccaatctggtgtgatgatctctttttttcttctctcttttaagaagtgtattatggaatttttttgagcacacacaaagagagcaatgtaacgaaccgtcctgtcctcatcaccagcacacagccagttcttcctgcgtcctcaccaccttcttccaaatccccagattattttgaagcaaatctctcacatcatgaatttaatctagaaataatctataaacacatgaatggatagctctagagaatactttaaaaacaactccggccgggtgccggattacaggtgtgggatcacacctgtaatcccagcattttgggaggccgaggcaggtagatcacctgaggtcgggagttcgagaccagcctggccaacgtggcaaaaccccgtctctactaaaaatacaaaaaattagccaggcgtggtggtgtgtgcctgtaatcccaggtactcgggaggctgagacaggagaatctcttgaacccagcaggcggaggttgcagtgagccgagatcgtgccacttcactccagcctgggcgacagagggagattctgtctcaaaaaaataaataaaaataaaaataattaaaaaataaaaacaactctgatagtgattcacactgaagaatcactagtaattccttaatatggtcacacttagtctgtggtgatttcttgaccgtatccatatggtgcccaaaccagcgattcacaggttgtgccaacttctggccgtgcacctaacggaagcacttggtggggccttttccttacgtgcagtgatgcagacaggtgctgggacagtcagctctccgggagccaggctcccggagagactgctgatgtgttgtcagttaaaaagaggtggcaccttggctccaggaatgtgtttccttgccagaaggatcccctgacttggaaccacagaggcagcagcggatgccccatgttggtgggctcttctcccagaggtgcagcagggcaggccttgtgggaaggtgggagctcctggctgtgagattcagcactgctgagttagggcagcgacagggacttgggaagcctcctgcagctgggaccctggctgtgccaccgcagcctttcagaaccagttaatactaacacaactttcataagaagtcactttttgtctgtttctaccaagcaattcttttggaatttatgatatttatatcctcattttaacttggtatctgtagaatagaagatatgttcctggatattagatataaatttttgagacagggtcttggctctgttgcccaggctagagtgcagtggcatgatcatagctcactatagcctgaactcttgggccgaagtgatccttttgcctcagcctctggaatagctgggactacgggcatgcactaccatgcctggctaattaaaaaaattttttaagacaagtctcactatgttgctgaggctggtctcaaactcctggcctcaagtgatcctcctgccttggccttccaaagcactgggattacaggcatgagccactgcacccagcctggtattaggtgtaatttttttttttttttttgagacagaatctcgctctcttacccaaactggagtgcggtggcacgacctcagctcactgcaacttccacctcccgggttcaagcgattctcctgtctcagcctccccgagtagctggcactacaggtgcctgccaccacatctggctaatttttgtatttttagtagaggtacggtttcaccatgatggccaggccggtcttgaactcctagcctcaaatgatctgcccacctcggcctcccaaagtgctgggattacaggtgtgggccactgtgcccggctggatataattttatttgagcttttatcaaatggtttttcgtactgagttttgacaggctttgttttaaccgtgatttggctccagctaggtgcccctttgctcccctgccttattctggttgatggcgcatgtaggtgatacgggcatgaaaaccaggcttgaggacatcacaaccccaaggggctgtgcctccttccaggagtcctgccaagcccagaagttgtgctcttggccttgcgtgctcatctcggaggcggcagcaacacttcgctttggcttgaatttcagtgtcgggcatccctgcctcaaagctggttgaagctcatggaacctttgcctctgccacctgcacagtctgccaaagacccttcccaggggaggacattcgggtgagttatcctgctgttggttgtccttctgcagtttgctgttggggtgatctggaaaagtggtattttataagcattgtctcgaaaggacagttgaacaataatagtgtgaaacattttatttgtaaattagaaaatcaatacatgcttgtaaaaaaatttaagacaatatagaaatatgtagggaaaatgaatctcccttcagccaattccagctgcccactttttttttttttttttgagattgagtctcactctgtcgcccaggctggagtgcagtgggcgatctcggctcactgcaacctccgtctcccggattcaaggaattcttctgcctcagcctcctaagtagctgggattacaggcgtgagccaccacgcccggcaatcagatggccttttgtgccgagcttatttcctgaaaatgtttctcgctccttcgccttgtagcttgtgttagtatttcatcctgtttcatggctaaatgttccactgatgtatgcaccacagttggtttgtttgtacatggatgggtgtttgggttgtcccacctttctgctcttgtgtatagttctgctgtggagcatatgcaagtattcgtttgagagtccttgttttttattcttttgagtatgatacctacaagtattgctgggtaactccacgtttagctatatttatttatttattttttgagacacagtcttacactgtcacccaggctggagtgcaatggcgcgatttcggctcaatacaacctctgcctcccgggttcaagcgattctcctgcctcagcctcctgagaagctgggattacaggtgcctgccaccatgcccagctaatgttttttgtatttctagtagagatggggtttcaccatgttggccaggctgctcttgcattcctgacctcaggtggttcacccgcctcggcctcccaaagtgctaagattacaggcgtgagccaccatgccctgcccatgtttaacttttttgtttgtttgttttgagacggagtctagctcttatcaccaggctggagtgcagtggcgcaatctcggctcactgtaccatccgcctcctgggttcaagcgattctcctgcctcagcttcctgagtagctgggactacaggcacacaccaccacgcccggctaatttttgtatttagtagagtagtttcaccatgttggccaggatgtctcgatctcttgacctcgtgatccgcctgcctctttctcccaaagtgtgggattacaggcgagagccactgcgcccggcccgttttaactttttgaggaacgaatatactgttatctgcagaagctggaccattttacattccaccaacagtgggcaagggtttcatcttttccacatcccaacacttactttccattttttaattacagctatcccagtgggtgggaggtggtaacccactgtagcactgattggcattttcctaatgattcatgatatcaaacatctttccatgtgctttttggccatttgtatatctttggagattgaagtcctttgcgcattgtttaattgtgttgtcttttttattgttaagagagtcctttatatattctggaagctagatccttatcagagacatgatttgcaaatattttctgtcattctgtaggttgtcttttttactttgttgatgtcttttgatgcatagaagttttgattttgatgaaatctagtttgtctatttattttctcactcttttggaatcatatctgagaaatggtattgttttactcctgttttcttataagagttttatagtttaaagcttttacatttagttctttgatccattttgagttaatttttgtgtgcgctgtaaggtagggatccagcttcattttcttttatgtggatatgtaattgttccagcaccatttgtttaaaaaaactgtggtcttggcattgttgttgaaaatcagttggccataggtgtatgggttatttctagagtctcaattctattccattgttatctgtatatccttgtgcctgcactataatgttttggttactgtagctttgtagtaagttttgaaattaggaagtgtgagtccagcacatagtagaaacttgatatatacgtattattgttttggtcaactcattcattgaatgaccaatttattcaacaaatagtttagtctcctcagtgccaggccctttgctgggttctgtggatgtgaatagaaattaaaataaggtggagtcatccaacagttacaactgggtgccatacgaattttactataaatatgtactggacactacactgactcagctgtaggaacagagtaggctgggaagcacctttgagatgaggccgtctggatgtaagagtctgtttctggcagcagagacctggagtgtgggaggcctgcttgctctgttagggtttgaactgtatcctgacgatcatgggaggcattggaggatttttaggcaggaaaatgatgtgaagggatttgcatttaaaagagattatttgggactgggcacagtggctcacgcctgtaattccagcactttgggaggcctagacaggcgggtcacctgaggtgggaagcttgagagcagcctgccaaaatggtgaaatcccatctctactaaaaatacaaaaattagccaggtgtggtggtgcacctgtaatcccagctactcaggaggctgaggcagaagaattgcttgaacctgggaggggaggttgctgtgagctgagatcgcaccactgcactccagcctgggtgacagagtgagactccatctcaaaacaaaataaataaataaataagagaataaaatagataatttgggcaacaggttgatgttaattccccacctttgttcttctccttcagtactgtgttggctggtctgaatcttttggcttttcatataaatttctgaaactgttgctatctgttctctgcctgttttatttttgttgttgttgtttggattttttgtttttttgagatagagtcttgctctgttgcccaggctggagtgcagtggtatgatctcagctcattgcaacctccccctctcaggttcaagcgattctcttgcctcatcctcctgagtagctgggattgcaggcatgcgccaccatgcccagctaatttttgtatttttagtagagatggggtttcactatgttggtgaggctggtgtcgaactcctgacctcatgatccacccgcctcggcctcccaaagtgctgggatgacaggcatgagccaccgtgtctggcctctctgcctgttttttaagacttttgtctttggagttttgcggtttctccactgtggttttccatatgaattttcttttatttcttctgcttaaaatttgtaggccagttggtcatggtggctcacgcccgtaatcccagtactttgggaggccgggtgggtggatcgcctgaggtcaggagtttgagaccagcctgaccaacatggagaaaccccatatctactaaaaatacaaaattagccgggcgtgatggtgcatgcctataatctcagatactcgggaggctgaggcaggcgaattgcttgaaccagggaggcggaggttgcggtgagctgagattaggccattgcactccagcctgggaaacaagagcgaaactccatctcaaaaaaaaaaaaataataataataattgtaggccttccttaagaaaaataaaataaaattctaggctgggcgcggtggctcctgcctgtaatcccagtactttgggaagctgaggcgggtggatcacctgagttaggagtttgagaccagcctggccaacatggtgaaaccccgtctctactaaaaatacaaagatgagccatttgtggtggcacccatctgtaatcccagctactcgggaggctgaggcaggagaattgctggaacccaggaggcagaagttgtagtgaaccgagatcatgccactgcactccagcctgggtgacagagcgagatgccatctcaaaaaaataaaatataaaataaaattctaagccctgcaaccaactgaatggagccctccccttggtcaagggaaccccagagaaaccttggaagcttgagttcctggccgtagcaggagaggaggtcagacgcgcctcactgtacccctccctccccagccaccattaggcttcttcactaagggctaaacagaaaccagcccttttcaaagactctacactgctaatgtggattactggtttatcttcccagatacagattaaagacaagatgagattaatggttccttcacccttccctgagaggtctgcttagttctcttcctctgtttccttctatcttaggtaaaatgtacatttactgggcacttactgaagtctcacaagtacgtaaccactcacctcacagccaccctccctctttgaaggaccacatgtaattactaaacctcctgagaacctcttgggacagaaacaagcacagatgtgccgtgactcatgtttttcctgtgggcaccctcaggctggctcagtagccctcacttgcttgagatcctgaatctgcgggttggcgtctttcatggttgctggatcatactctgccgttatctcttcggatatgagttgcccctagcccactatctggcccctctctttagggacctctgattgaacatacattagaccttctctctcctgctgttcctgatcactcttctgtcctgtaattgctgcttcttgtgctgcattctgggtaatttcttctggtcttttttccagtttactaatattgtattctgttataaggtccttccattgagtgtttctttctttcttttttcccaaacagcaactcaaaacagacattgagttttaattttggttcctgtactttttatttctagaagttctatttggttatttttcaagtctgctacattattacataattttttaataattttatatctttaatagatagttttttgttttgttttgttttgttttgttttttgagacagagtctcgctttgttgcccaggctggagtgcagtggtgcaatctcagctcacagcaacctccgcctcccaggttcaagtgattcccctgcctcagcctcccaagtagctgggattacaggcacgcatcaccacgcctggctaattttttgtgttttagtagagacagggtttcaccatgttggccaagacagtctcgatctcctgacctcgtgatctgcccacctcggcctcccgaagtcctgggattacagagctgagccactgcgcctggcctttgatagatatttcaagttcatcttttttttttgcttccttaatttttttttttgctataccccatgcctccaagataacagttttttctttttaatttaaatataatacagttttactgtgtatccaagaatatctgaaatctttcgtgggtctctttcttttgtcttttgtatctgttgctttttgctgggctgagcctgcttaaaacaagccccgttagctgtaaaggtttaccttagaaagtcaggtgtcttcctctgtaactctctcccttttccatctgctccaaggcatttatttatattaatcttgacgcaaagggaagttgtgtccacttcaccttggccagtaaggaagcagtgtttggcagatgttgttactcctaataatgccagccagtgagtgaagctgacctgaatgcctcccagggctgaggcaatggcatgatcaccgaagctcaaaccagagacagtttcacctttctgactgaatagtgttcggtgtaggccaaatgcctgcagactactgtttgaggactggtgtggtctaccaggtgtttccttagcgcctggatgtctctggctgccatcccagggatagagcatggtgttagatacgctagatgcctgccgaagtaattatgggtgaaacatatgatgtccaagatttgcttttaaaggctccaatacctcctcccagattccggagggctgtgaaacaattagctatgaaaactggtaattcctgaagctgggtacatgggggttcatgatccctctctcaccttttttgggggagaatgtttgagactttaataagaacttgttgccttttccttttacagggtgttgcaggcatcttcctcaggcctgttttctctgttttccaggctgacgtgatggcagacagggttccccgctgcccggtctgcaccggcgttgtgaagcccgacattgtgttctttggggagccgctgccccagaggttcttgctgcatgtggttgatttccccatggcagatctgctgctcatccttgggacctccctggaggtttgtcagcaggcctgtgcagggaggaggctggagggcaggggaagggaggggtacaggagtcatctcatgggctgtcggcaggcctgtgcagggaggagtctggagggcaggggaagggaggggtacaggagtcacctcatgggctgtcggcaggcctgtgcagggaggaggctggagggcaggggaagggaggggtacaggagtcatctcatgggctgtcggcaggcctgtgcagggaggaggctggagggcaggggaagggaggggtacaggagtcatctcatgggcccttccagggctggtgccactttgggaaggtgaatggattcagctggggttccaggctgagggagcagcagcctgtgcaggagacaggaaggtgggaagctgctgggctttggaggtggtataggtgtgggtggggcaccacgtgtgaggagaagggagaaggatgggggtgtgggggcgaggtggaggggcagggcctcccaggtcagatcaggaatactgatgctgcagtgggaggagtgataaatccacagggactggcccggggacgtagctgcacccttggggtcagggaggcctttggggagtggagagtggagcaagcagtgccaggaggctggtcctggagaaggtggagctgtggtcgcctgagggatggcgaggagggggactggactcgcagtctgtgatgttttggggacgtgagaaggaggcgtctggcttggtctgtaaggtcagggcacttgctggtgaggcgtgatttgggagggaggatgcccagctcggttctgtgtgtgtctgaggtgtcgggaaacatgccctggatgtgttcaagcagctgttctgcgtctgcgtctgcagctcaggaaattcctaaaagctgtgatgagagcaagaaatgagaccatgaagtcagtgtgtgcgtgactggatgtaggcaccgaggacagaagggccagaaagacctgtgctcagaggggcccagggcagccacaggggcccagagcatgtgtttgttcaggcattcattgtgtgctgggccctgctccagtgctttggacatacacggtcagatgtcagtgtaagaagttatatagtttgttaggagatgattgatgttatgagaaagataacaagtaggatagaaaggctagaagggttgggaaccagctgcagtgtcaagtcaggcaggtggagttggatctaagagtttaccgaggtgaggagggtctggcaggggacactgcacaggtgacaagcagcaaggagggtggggcgaagtcagcattgatggccacggggctggagcagagaagaaggtggggcacaagtgtcatctcatgggaggctggcgccacctcagaaggtgaatgggttcagcttgggttccaggccagagtctgaagttgagaggactccgttgggtgctgggctgtgagcccaccatgggggcaagactgggagcagcagacccagcagggcccttgtaggtaatcaccggctggcactggctgggggccaggtaaagccagcagaggctgaggggtgctggagtctgggtgtgtgtgaacgcagagtgggtacgctggcacagtgcatgggaggccgtggattcccaaggaccccagggctgtggctggagcagctggaaagacggagccgccgcttcctgagatggagaagcctggtaggtgggtttgggggagctcaggaactcagccttgtttccacggatttgaggatgtgctgcggactggaggtgttgagcaggtggacatgagtctggagtccaggaaggcccagaggcaggagctggggtgctggagtgagcagacaggagagcccagggtgtggacagacatgagaatgccatgctaggcctaggatggagggacagacacaggaggagcagtcagaggggccatggtggtcagcacagtgtgggctgagaccagctgaccgtgctggccaccaggtgtggacacttgggccaccagccatctttattgttgaagtgaaatgaaaatggcctttttcctgattataagtgtatcatgtgtgtctttgaaaagattcgtacattatataaagatataaagcaaaggatcaactttttaatcccaccaactgttagcattttattctgtgtcctctcagctttcttttttttgtacaaatgcatacgtacagatggtaattttaaactaaaagttggacagcactgtacattctattctgcagcctgctgttttcacgtaacaatgtgagtccatggagatgtgctgcgttgttaatgccaacagtttcccttacacggatatgaggtcccaactgagaaacccatgtctgtaaggctggtgccatcatgaactgaatgagctggtgtcacgcacagactctatctcatgtgctttgtggacgaaatgttaatgtgtttgactgtggagtaccactccagatcccctttaggtgtgacataacgtgggatgtaaaccatatgatcttttctaaaatctcaaaaattctgaaacatattcagccacaagagctttaacatagattttgtggatttaatacaaaatttatgtaagcaatttcttactgatggacaatgataataaatagtatataatttttacattaaaagtaatgctgggccaggcaccgtggctcacacctgttatcccagcactctgggaggccaaggcaggaagattgcctgaagctaggcatttgagaccagcctgggcagtatagtcagacctcgtctctacaaaaaataaaaagatagccaggcatggtctgtgtagttgcagctatttgagaggctgaggaaggaggattgcttgagcccaggaatttgaggttatagtgaactatgatcatgccactgcattccagcctgggtaacagaatgagatcccgtgctgtagtgaatatccctgtgtatcatccttatctactcatgcaagtactcctgaagggtaaatgctgtagtgaatatccctgtgtatcatccttatctacccatgcaagtactctggaagggtaaatgctgataaatactgagaacttgccttccggtgaatatccctgtgtgtcatccttatctacccatgcaagtactcctgaagggtaaatgctgtagtgaatatccctgtgtatcatccttatctacccatgcaagtactctggaagggtaaatgctgataaatactgagaacttgccttccggtgaatatccctgtgtgtcatccttatctacccatgcaagtactcctgaagggtaaatgctgtggtgaatatccctgtgtatcatccttatctacccatgcaagaactcctgaagggtaaatgctgataaatattgagaacttgccttccagaaagatgtaacaattacactgccacaaactgtgtttttatgtagccattttatcacatcctcaccaaaaccaaaatcacacaaatcaaattggttaaaaaatgcatgtgtgtgtgtggaggggggtgcggattttgcctttctgtagtaaagaatgaagttcatcttttcatgtttattgccagttgtgtttcttctctttggattgtatatttgtacctcttgaccatttttcattgggtcattataaattagcaatataaattagttttaattttagtataaattaaataatataattacattttaatgttaatataaacttctttcttttttttttttttttttttgagacagagtcttgctctgtctcccaggctggaggttcagtggcgcgatctcggctcactgcaacctccacctcccaggctcaagccattctcctgcctcaacctcccgagtagctcggattataggtgcgtgccaccacgcccagctaagttttgtatttttagtagagacgtggtttcactatgttggccaggctggtcttgaactcctgacctcagctgatctgcccgcctcggcctcccaaagtgctgggattataggtgtgaaccaccatgcccagctgttaatataaatttcattataaattagcattataaattagttcataaattatatgtttataaatgagtttatcaattagcaatataaactattgtcatatgttgtaaatatttttgcagtttatgatgatgagaggtttttaaaaattttaaattttctacatagtagttttatgtagataccgagataatagtatttacatagtcagatctgtcattttcctttgccttatctgacttcagtttttacgcctagaacgttcttccctatccttacttgtaaatccttagttttcttcaagaactgttttgtttacattgaaacctttaatccatttgaatttttttcagtgggaggtaggaatggagtattttcctcccagataatgagccagttttaatgccatttattaatgtatccatttttttaccttgttcctcttaaaagaagctttgagagctgtatgaagaagcctgatggcaccgagctaggcctctctagaggctgggtggggaagaccatggagagacgtaacagtaactcctgctcgggggcaccagctcgtctgggtgcccgatgctggtggtggctgtcagagcaagcagggctagccagaggagatggacgagtctgtgctgttgtccctctgcgtcatgctgggagacagcgaggtggggaggacagggagaacagaacgtgctcacaaagaggaggcaggaaggttggatccctgatgagccttggaacggaggtggggaaaagcaaggatgtgtggaaacagcaagaagtgggagagagagagagaggcggaggggagaaaaccgtcacggaggccaagcggcaggagctcagctgaagaaatgagattggtggtgggttttccctatatcgcaggctctgactgccaatctgctgctcctccaaggcctcggtggctgtggcatgaaacatcctgaggagcttgtaaagtggacactgtgcccctcacgtttggcccatttttcaggtggagccttttgccagcttgaccgaggccgtgcggagctcagttccccgactgctcatcaaccgggacttggtggggcccttggcttggcatcctcgcagcagggacgtggcccagctgggggacgtggttcacggcgtggaaagcctagtggagcttctgggctggacagaagagatgcgggaccttgtgcagcgggaaactgggaaggtacagactgctgaggaggaccatccaaggggctgcccttctcactgctctagggtatggtccacctgatatggagccccgttggttaacacagtaacagtaatagctgatgatgctgtgaatcctgcaccaggcactacctggacctgactgggtgttactttcaatacctccatttagagatgaggaaacagatgctaacaggccaagcagggacacggtccagacactcagggctgatgagtctgtattcttaacagactataggcgttaccttcactccctaaaataaagcagccaacagtgtccctctaaggcctggtatgtgattctaagatgatacgggttaaagaactttgagaagctaaagttctctgcatctatgtgggatgaaggctacatgagtgatgcttttcggaagtaattggtatgagagccattgatcaattataatccgctgaggaaagccaaagagccttgatgctttctaagagatttcaaaccgcctataaacaagtgaagttacagaaaatgcagtttcccataagaatcatgtagcatgtgtagccttgatattaagggttttcaatgggaggtggtagcattaagcatttaaagtccagtgtcatgattacaggcaggtgtaacactgtccaaaggggatttcaccagtgtattagtctgttctctggctgctcataaaggcatacctgagactgggtaatttataaaggaaagaggtttaatggactcacagttccatatggctgtgggggcctcacaatcatagtggaaggcaaagcaggagcaaagtactgtcttacaaggtggcaggcaagaggacgtgtgcgggggaactgccctttataaaactatcagatcttgtgagacttattcactatcagaagaagagtgtgggaaagacccgcccccatgattcagttacttccacttggccccacccttgacacatggggatgattacaattcaaggtgagatttgggtggggacacagccaaaccatatcaactacaatatatcacagttgatgctcctcttgccttccaaggcagatgtcttaggaaatcctgatcctttttccttgtccacagctgtggctgcctcatggctcagggccatggggtcagcactctcctcacctccaccagtccaagacctccaacctctggttgcaggctgattttttaccaatcatggtcacttcattatggaggcagggaacccagctaacaatgaggcttaaacgctgagaggcgagtgcctcctggccagctcacaaggcagcggagatcttagatcagcccagcaggcttttttgagggatccttttcctgctccaacttcatattttcttttttttgtaatggagtttcactcttgttgcccaagctggagtgcaatggcacgattttggctcactgcagccctgcctcctgggttcaagtgattctcctgcctcagcctcctgagcagctgggattacaggcatgtgccaccatgcctggctaatttctgtacttttattagagatgggatttcatcatgttagtcaggctggtctcaaactcctgacctcgggtgatccacctgcctcagcctcccaaagtgctgggattataggcatgagccagcaggcccggcccaacttcctgttttcatagaaaagcagattgtaactctggtagctcctgtggagttttggaagtggcttaataggatttgaactgtataatctagtttcagagaaatgtatgtaaaatgggttatgatttcattttctgttttttacagcattactatccaaggggttacttttccaaatagtgaatgcttttaagcacatgagcatcagtacatattgatttgggtactttaagacccatagaatgaggctctccatttagccaccctgttctgcccaggcctgctgggatcctcttagcccagcacagcagcagcagtatttgcagaaagcagcttgttttgtgaaatattttgcatgtctgcagctagagctgtttgaacagagatctgctggcctgcctgggtgtgtaaacagatagctgataccctctgtcttctgtattccagcttgatggaccagacaaataggatgatggctgcccccacacaataaatggtaacataggagacatccacatcccaattctgacaagacctcatgcctgaagacagcttgggcaggtgaaaccagaatatgtgaactgagtggacacccgaggctgccactggaatgtcttctcaggccatgagctgcagtgactggtagggctgtgtttacagtcagggccaccccgtcacatatacaaaggagctgcctgcctgtttgctgtgttgaactcttcactctgctgaagctcctaatggaaaaagctttcttctgactgtgaccctcttgaactgaatcagaccaactggaatcccagaccgagtctgctttctgtgcctagttgaacggcaagctcggcatctgttggttacaagatccagacttgggccgagcggtccccagccctcttcatgttccgaagtgtagtcttgaggccctggtgccgcacttctagcatgttggtctcctttagtggggctatttttaatgagagaaaatctgttctttccagcatgaaatacatttagtctcctcaaagggactgcaggtgttgacatgagttggaaagggaaccctgggatacgtggcgtcccctctattggaacagtctgaggactgaaggcatttgtccctggatttattggagacggcccagctcctccctctgaaggtggtcacattctgttgactctccatactcagcctctcctccagaaacagatctgttccagaacattccagcactttctatctggcctccttgtccccacactacgcccccccaccctcgccagggcttcctctagtgacactgttagagctaatctctgagacagggaaggcattactcacttaaaacccaggctgagtcctggccacctgctggattgtgacataggaggtggaatccactgaactgctacttctgcacaggctccttctcctggggctgtacccaggcccagccctgatggctcaccctgtcaggcaccagctgctccctcctgggctctcacccacctgcacatcctccttcctagcatcacattacctgcgtgtttccccagacaaaagcacttcccattcttgaaccttgcctaccctgggctgagctgacggcaatagatttaatgacagtgactcccaggaagggggtcctgtgactttgcgccttaataagaacaaaaggtggaattggtgacctaggaaaactgttgaattctaaaaagaatgaagttagtttctaaccctagttaatgttccttttttattttttgagtcttgccctgtcactcagggtggagtgcggtgttatgatctcagctcactgcaacttccgcctcccgggtttaagcgattctcctgggtagctgggattacaggtgtgtcccaccacacctagcacatgggcatatttgtaatagagacaaggttttgctatgttggccaggctggtctcgaactcctggcttcaagtgatccacccacctcggcctcccaaagtgctgggattacaggcatgagccactgtgcctggcccctttatttgataatttacacatacatttttgtccaaaactcttctttatttcaagatgatgtttctgtggctatgtgtggtatgtggtataaatctcaatctatggtca

SEQ ID NO: 13981 - DNA, 2882 bp, Homo sapiens
ggactgcgcggaacatggcgttctggggttggcgcgccgcggcagccctccggctgtggggccgggtagttgaacgggtcgaggccgggggaggcgtggggccgtttcaggcctgcggctgtcggctggtgcttggcggcagggacgatgtgagtgcggggctgagaggcagccatggggcccgcggtgagcccttggacccggcgcgccccttgcagaggcctcccagacccgaggtgcccagggcattccggaggcagccgagggcagcagctcccagtttcttcttttcgagtattaaaggtggaagaaggtccatatctttttctgtgggtgcttcaagtgttgttggaagtggaggcagcagtgacaaggggaagctttccctgcaggatgtagctgagctgattcgggccagagcctgccagagggtggtggtcatggtgggggccggcatcagcacacccagtggcattccagacttcagatcgccggggagtggcctgtacagcaacctccagcagtacgatctcccgtaccccgaggccatttttgaactcccattcttctttcacaaccccaagccctttttcactttggccaaggagctgtaccctggaaactacaagcccaacgtcactcactactttctccggctgcttcatgacaaggggctgcttctgcggctctacacgcagaacatcgatgggcttgagagagtgtcgggcatccctgcctcaaagctggttgaagctcatggaacctttgcctctgccacctgcacagtctgccaaagacccttcccaggggaggacattcgggctgacgtgatggcagacagggttccccgctgcccggtctgcaccggcgttgtgaagcccgacattgtgttctttggggagccgctgccccagaggttcttgctgcatgtggttgatttccccatggcagatctgctgctcatccttgggacctccctggaggtggagccttttgccagcttgaccgaggccgtgcggagctcagttccccgactgctcatcaaccgggacttggtggggcccttggcttggcatcctcgcagcagggacgtggcccagctgggggacgtggttcacggcgtggaaagcctagtggagcttctgggctggacagaagagatgcgggaccttgtgcagcgggaaactgggaagcttgatggaccagacaaataggatgatggctgcccccacacaataaatggtaacataggagacatccacatcccaattctgacaagacctcatgcctgaagacagcttgggcaggtgaaaccagaatatgtgaactgagtggacacccgaggctgccactggaatgtcttctcaggccatgagctgcagtgactggtagggctgtgtttacagtcagggccaccccgtcacatatacaaaggagctgcctgcctgtttgctgtgttgaactcttcactctgctgaagctcctaatggaaaaagctttcttctgactgtgaccctcttgaactgaatcagaccaactggaatcccagaccgagtctgctttctgtgcctagttgaacggcaagctcggcatctgttggttacaagatccagacttgggccgagcggtccccagccctcttcatgttccgaagtgtagtcttgaggccctggtgccgcacttctagcatgttggtctcctttagtggggctatttttaatgagagaaaatctgttctttccagcatgaaatacatttagtctcctcaaagggactgcaggtgttgacatgagttggaaagggaaccctgggatacgtggcgtcccctctattggaacagtctgaggactgaaggcatttgtccctggatttattggagacggcccagctcctccctctgaaggtggtcacattctgttgactctccatactcagcctctcctccagaaacagatctgttccagaacattccagcactttctatctggcctccttgtccccacactacgcccccccaccctcgccagggcttcctctagtgacactgttagagctaatctctgagacagggaaggcattactcacttaaaacccaggctgagtcctggccacctgctggattgtgacataggaggtggaatccactgaactgctacttctgcacaggctccttctcctggggctgtacccaggcccagccctgatggctcaccctgtcaggcaccagctgctccctcctgggctctcacccacctgcacatcctccttcctagcatcacattacctgcgtgtttccccagacaaaagcacttcccattcttgaaccttgcctaccctgggctgagctgacggcaatagatttaatgacagtgactcccaggaagggggtcctgtgactttgcgccttaataagaacaaaaggtggaattggtgacctaggaaaactgttgaattctaaaaagaatgaagttagtttctaaccctagttaatgttccttttttattttttgagtcttgccctgtcactcagggtggagtgcggtgttatgatctcagctcactgcaacttccgcctcccgggtttaagcgattctcctgggtagctgggattacaggtgtgtcccaccacacctagcacatgggcatatttgtaatagagacaaggttttgctatgttggccaggctggtctcgaactcctggcttcaagtgatccacccacctcggcctcccaaagtgctgggattacaggcatgagccactgtgcctggcccctttatttgataatttacacatacatttttgtccaaaactcttctttatttcaagatgatgtttctgtggctatgtgtggtatgtggtataaatctcaatctatggtca

SEQ ID NO: 13982 - DNA, 19964 bp, Homo sapiens
ggaggactccttggactgcgcggaacatggcgttctggggttggcgcgccgcggcagccctccggctgtggggccgggtagttgaacgggtcgaggccgggggaggcgtggggccgtttcaggcctgcggctgtcggctggtgcttggcggcagggacgatgtgagtgcggggctgagaggcagccatggggcccgcggtgagcccttggacccggcgcgccccttgcagaggcctcccagacccgaggtgcccagggcattccggaggcagccgagggcagcagctcccagtttcttcttttcgaggtattttgggcaaggacaagcacttcttgcgtgttcgttgtcgacacctcgcccactctttctcaccttgccgtgtttcctttgcggcatgtctgggagtttacgtgcgttccaacaccggggcctccgtctttatgctgatctgtggacgtcacttatgggggttttgtcgtttatttcaccattccctcattgaaatacgttctaacctttagttattgtgcatcatgctgtggtgaataaccttgttggcacctcactgtttgcataaattcctagtactgggattgctaggtccaaaagtatatgcatttaacgctttaatgatccctcataaatgttgtgcggttaatactcccactggcatgtgatcgtacccgtctccatagtaattgcatctaagaactgaggctacataggaaaaaatcttaaggtccatggttgttaggtatcagatgccctataatggatgaatatttaagtaaataatggcacattgacttgctgtctgacacaactgctgaaaatgttggtgaaaagtgagtctcgaagtggtagctcacacttgtaataccagcactttcggaggctgagacggggatcgctcgaggccaggagttcaagagcagcctgggcaacataacgagacccccatctctaccaaaaatttaaaaattagccgggcatggtggcgcaagcctgttgtcccagttactcctgagactaaggcaagaggatcccttgagtccaggagttcaaggctgcagtgagctatgattgagccactgcactccagcctgggtgacagagcaagactcttatctacctgtgggaaaaaaaaaagaaaaaagtttaatagatcctgaagagttggccgggcgcggtagctcacgcctgtaatcccagcactttgggaggatgagacgggtggataacgaggtcaggagttcgagaccagctgggccaacatggtgaaaccccatttctactgaaattacaaaaattagccgggcgtggtggcgggcgcctgtaatcctagctactcaggaggcggaggcaggagaatcacttgaacccggaaggcagaggttgcagtgagccgagatggcaccattgcactccagcccgggcgaaagagcaaaaactccgtctcaaaaaaaaacaaagatcccgaagagtcagtcgttcatccaagaagccctgactgagctcttattctgtgccagactctgttctaggtgctatggatggagcagggaccaggacctacaaacacgtggagcgcattctaatatctgtgatactctgcaaaactgttaaaacaaatccttgcggccgggcgcggtggctcacgcctgtaattccagcactttggaaggccgagacgggcggatcacgaggtcaggagatcgagaccatcctggctaacacagtgaaaccccgtctttactaaaaatacaaggaaattagccaggcgtggtggcgggtgcctgtagtcccagctactcgggaggctgaggcaggagaatggcgtgaacctgggaggcggagcttgcagtgagccgagatcgcgacactgcactccagcctgggcaacagagcgagactccgtctcaaaacaaaacaaaacaaaacaaaacaaaaatccttgctaccactggccctaaagcaggaggcatagggctgcgtgtgaggagtagtccattgcatgggcttcctccagtttggctttggatttttgagctctctgaatttgttgtttgtgtcctttgcacagtgtccctcccaggttgcacccatgcctgcccctcagggtcccccactcccagtgaatttcacaccatgcagcatgtactttaagccatacatcttacgtatgttccagacatttggtaaaacgccgtttatgtgtttttcagtgactcacaaacattttatttacgtaaatgaggaatgtactcaggcacccttcgtgataccttgccctcagcaggcactcaacagcaataataactttcattccttttgtgcttctcttaacagttcgtgtttagtaggagcacagtagctgtttggggaacgaccttaagtgaatagatgtctgaaatgctgtgtgaagtggggcgcttaataggtggtgagatggttttagaaccagggttttccctctttgcttcttgactccttaaccagttttcattaggagacccctttggaggtttgcagtcagtcagagttgagtgcctactgagtgtactgaattatgaaatgagcacagttcccattaacctgaattttttgctcccaagtaagtcttgatttctgatttatgactgctttttgttgtaccccaatagtcgtctaagaaaggtgattattttgagaggcctggggagacacacatgctcattctcgagggtggcggtggtgcagagggcagagccatgctcgttcttgctatcctgagattggttgctatctgtttcctttgctgctgtgtttttttctgtcagtattaaaggtggaagaaggtccatatctttttctgtgggtgcttcaagtgttgttggaagtggaggcagcagtgacaaggggaagctttccctgcaggatgtagctgagctgattcgggccagagcctgccagagggtggtggtcatggtgggggccggcatcagcacacccagtggcattccagacttcaggtactgcccacagtcccacctgccttctgcgctcccctcccctgactcctgccctccccactgcccagtttattccacttccctgtcctcttccaaaggcctcagagcctttcttctctccctgcagatcgccggggagtggcctgtacagcaacctccagcagtacgatctcccgtaccccgaggccatttttgaactcccattcttctttcacaaccccaagccctttttcactttggccaaggagctgtaccctggaaactacaagcccaacgtcactcactactttctccggctgcttcatgacaaggggctgcttctgcggctctacacgcagaacatcgatgggcttgagagaggtgagccctctgtgagtcgcacacattctttttctcccacggaggctcgggtgcctgtttctcccagggaggctcgggtgcctgtttctcacaggggatgctcgggtgcctgtttctggggacggccaaaacctatcgcttatgcttcttccttgggactttttttgagccaactagttagggctttgttcccaaggaaaatgtcctctgggtgtttaaaggccactgcttgttctcctgcatacctgcagagctgtgtattttgggcagaagttgacattgttttgccaatctggtgtgatgatctctttttttcttctctcttttaagaagtgtattatggaatttttttgagcacacacaaagagagcaatgtaacgaaccgtcctgtcctcatcaccagcacacagccagttcttcctgcgtcctcaccaccttcttccaaatccccagattattttgaagcaaatctctcacatcatgaatttaatctagaaataatctataaacacatgaatggatagctctagagaatactttaaaaacaactccggccgggtgccggattacaggtgtgggatcacacctgtaatcccagcattttgggaggccgaggcaggtagatcacctgaggtcgggagttcgagaccagcctggccaacgtggcaaaaccccgtctctactaaaaatacaaaaaattagccaggcgtggtggtgtgtgcctgtaatcccaggtactcgggaggctgagacaggagaatctcttgaacccagcaggcggaggttgcagtgagccgagatcgtgccacttcactccagcctgggcgacagagggagattctgtctcaaaaaaataaataaaaataaaaataattaaaaaataaaaacaactctgatagtgattcacactgaagaatcactagtaattccttaatatggtcacacttagtctgtggtgatttcttgaccgtatccatatggtgcccaaaccagcgattcacaggttgtgccaacttctggccgtgcacctaacggaagcacttggtggggccttttccttacgtgcagtgatgcagacaggtgctgggacagtcagctctccgggagccaggctcccggagagactgctgatgtgttgtcagttaaaaagaggtggcaccttggctccaggaatgtgtttccttgccagaaggatcccctgacttggaaccacagaggcagcagcggatgccccatgttggtgggctcttctcccagaggtgcagcagggcaggccttgtgggaaggtgggagctcctggctgtgagattcagcactgctgagttagggcagcgacagggacttgggaagcctcctgcagctgggaccctggctgtgccaccgcagcctttcagaaccagttaatactaacacaactttcataagaagtcactttttgtctgtttctaccaagcaattcttttggaatttatgatatttatatcctcattttaacttggtatctgtagaatagaagatatgttcctggatattagatataaatttttgagacagggtcttggctctgttgcccaggctagagtgcagtggcatgatcatagctcactatagcctgaactcttgggccgaagtgatccttttgcctcagcctctggaatagctgggactacgggcatgcactaccatgcctggctaattaaaaaaattttttaagacaagtctcactatgttgctgaggctggtctcaaactcctggcctcaagtgatcctcctgccttggccttccaaagcactgggattacaggcatgagccactgcacccagcctggtattaggtgtaatttttttttttttttttgagacagaatctcgctctcttacccaaactggagtgcggtggcacgacctcagctcactgcaacttccacctcccgggttcaagcgattctcctgtctcagcctccccgagtagctggcactacaggtgcctgccaccacatctggctaatttttgtatttttagtagaggtacggtttcaccatgatggccaggccggtcttgaactcctagcctcaaatgatctgcccacctcggcctcccaaagtgctgggattacaggtgtgggccactgtgcccggctggatataattttatttgagcttttatcaaatggtttttcgtactgagttttgacaggctttgttttaaccgtgatttggctccagctaggtgcccctttgctcccctgccttattctggttgatggcgcatgtaggtgatacgggcatgaaaaccaggcttgaggacatcacaaccccaaggggctgtgcctccttccaggagtcctgccaagcccagaagttgtgctcttggccttgcgtgctcatctcggaggcggcagcaacacttcgctttggcttgaatttcagtgtcgggcatccctgcctcaaagctggttgaagctcatggaacctttgcctctgccacctgcacagtctgccaaagacccttcccaggggaggacattcgggtgagttatcctgctgttggttgtccttctgcagtttgctgttggggtgatctggaaaagtggtattttataagcattgtctcgaaaggacagttgaacaataatagtgtgaaacattttatttgtaaattagaaaatcaatacatgcttgtaaaaaaatttaagacaatatagaaatatgtagggaaaatgaatctcccttcagccaattccagctgcccactttttttttttttttttgagattgagtctcactctgtcgcccaggctggagtgcagtgggcgatctcggctcactgcaacctccgtctcccggattcaaggaattcttctgcctcagcctcctaagtagctgggattacaggcgtgagccaccacgcccggcaatcagatggccttttgtgccgagcttatttcctgaaaatgtttctcgctccttcgccttgtagcttgtgttagtatttcatcctgtttcatggctaaatgttccactgatgtatgcaccacagttggtttgtttgtacatggatgggtgtttgggttgtcccacctttctgctcttgtgtatagttctgctgtggagcatatgcaagtattcgtttgagagtccttgttttttattcttttgagtatgatacctacaagtattgctgggtaactccacgtttagctatatttatttatttattttttgagacacagtcttacactgtcacccaggctggagtgcaatggcgcgatttcggctcaatacaacctctgcctcccgggttcaagcgattctcctgcctcagcctcctgagaagctgggattacaggtgcctgccaccatgcccagctaatgttttttgtatttctagtagagatggggtttcaccatgttggccaggctgctcttgcattcctgacctcaggtggttcacccgcctcggcctcccaaagtgctaagattacaggcgtgagccaccatgccctgcccatgtttaacttttttgtttgtttgttttgagacggagtctagctcttatcaccaggctggagtgcagtggcgcaatctcggctcactgtaccatccgcctcctgggttcaagcgattctcctgcctcagcttcctgagtagctgggactacaggcacacaccaccacgcccggctaatttttgtatttagtagagtagtttcaccatgttggccaggatgtctcgatctcttgacctcgtgatccgcctgcctctttctcccaaagtgtgggattacaggcgagagccactgcgcccggcccgttttaactttttgaggaacgaatatactgttatctgcagaagctggaccattttacattccaccaacagtgggcaagggtttcatcttttccacatcccaacacttactttccattttttaattacagctatcccagtgggtgggaggtggtaacccactgtagcactgattggcattttcctaatgattcatgatatcaaacatctttccatgtgctttttggccatttgtatatctttggagattgaagtcctttgcgcattgtttaattgtgttgtcttttttattgttaagagagtcctttatatattctggaagctagatccttatcagagacatgatttgcaaatattttctgtcattctgtaggttgtcttttttactttgttgatgtcttttgatgcatagaagttttgattttgatgaaatctagtttgtctatttattttctcactcttttggaatcatatctgagaaatggtattgttttactcctgttttcttataagagttttatagtttaaagcttttacatttagttctttgatccattttgagttaatttttgtgtgcgctgtaaggtagggatccagcttcattttcttttatgtggatatgtaattgttccagcaccatttgtttaaaaaaactgtggtcttggcattgttgttgaaaatcagttggccataggtgtatgggttatttctagagtctcaattctattccattgttatctgtatatccttgtgcctgcactataatgttttggttactgtagctttgtagtaagttttgaaattaggaagtgtgagtccagcacatagtagaaacttgatatatacgtattattgttttggtcaactcattcattgaatgaccaatttattcaacaaatagtttagtctcctcagtgccaggccctttgctgggttctgtggatgtgaatagaaattaaaataaggtggagtcatccaacagttacaactgggtgccatacgaattttactataaatatgtactggacactacactgactcagctgtaggaacagagtaggctgggaagcacctttgagatgaggccgtctggatgtaagagtctgtttctggcagcagagacctggagtgtgggaggcctgcttgctctgttagggtttgaactgtatcctgacgatcatgggaggcattggaggatttttaggcaggaaaatgatgtgaagggatttgcatttaaaagagattatttgggactgggcacagtggctcacgcctgtaattccagcactttgggaggcctagacaggcgggtcacctgaggtgggaagcttgagagcagcctgccaaaatggtgaaatcccatctctactaaaaatacaaaaattagccaggtgtggtggtgcacctgtaatcccagctactcaggaggctgaggcagaagaattgcttgaacctgggaggggaggttgctgtgagctgagatcgcaccactgcactccagcctgggtgacagagtgagactccatctcaaaacaaaataaataaataaataagagaataaaatagataatttgggcaacaggttgatgttaattccccacctttgttcttctccttcagtactgtgttggctggtctgaatcttttggcttttcatataaatttctgaaactgttgctatctgttctctgcctgttttatttttgttgttgttgtttggattttttgtttttttgagatagagtcttgctctgttgcccaggctggagtgcagtggtatgatctcagctcattgcaacctccccctctcaggttcaagcgattctcttgcctcatcctcctgagtagctgggattgcaggcatgcgccaccatgcccagctaatttttgtatttttagtagagatggggtttcactatgttggtgaggctggtgtcgaactcctgacctcatgatccacccgcctcggcctcccaaagtgctgggatgacaggcatgagccaccgtgtctggcctctctgcctgttttttaagacttttgtctttggagttttgcggtttctccactgtggttttccatatgaattttcttttatttcttctgcttaaaatttgtaggccagttggtcatggtggctcacgcccgtaatcccagtactttgggaggccgggtgggtggatcgcctgaggtcaggagtttgagaccagcctgaccaacatggagaaaccccatatctactaaaaatacaaaattagccgggcgtgatggtgcatgcctataatctcagatactcgggaggctgaggcaggcgaattgcttgaaccagggaggcggaggttgcggtgagctgagattaggccattgcactccagcctgggaaacaagagcgaaactccatctcaaaaaaaaaaaaataataataataattgtaggccttccttaagaaaaataaaataaaattctaggctgggcgcggtggctcctgcctgtaatcccagtactttgggaagctgaggcgggtggatcacctgagttaggagtttgagaccagcctggccaacatggtgaaaccccgtctctactaaaaatacaaagatgagccatttgtggtggcacccatctgtaatcccagctactcgggaggctgaggcaggagaattgctggaacccaggaggcagaagttgtagtgaaccgagatcatgccactgcactccagcctgggtgacagagcgagatgccatctcaaaaaaataaaatataaaataaaattctaagccctgcaaccaactgaatggagccctccccttggtcaagggaaccccagagaaaccttggaagcttgagttcctggccgtagcaggagaggaggtcagacgcgcctcactgtacccctccctccccagccaccattaggcttcttcactaagggctaaacagaaaccagcccttttcaaagactctacactgctaatgtggattactggtttatcttcccagatacagattaaagacaagatgagattaatggttccttcacccttccctgagaggtctgcttagttctcttcctctgtttccttctatcttaggtaaaatgtacatttactgggcacttactgaagtctcacaagtacgtaaccactcacctcacagccaccctccctctttgaaggaccacatgtaattactaaacctcctgagaacctcttgggacagaaacaagcacagatgtgccgtgactcatgtttttcctgtgggcaccctcaggctggctcagtagccctcacttgcttgagatcctgaatctgcgggttggcgtctttcatggttgctggatcatactctgccgttatctcttcggatatgagttgcccctagcccactatctggcccctctctttagggacctctgattgaacatacattagaccttctctctcctgctgttcctgatcactcttctgtcctgtaattgctgcttcttgtgctgcattctgggtaatttcttctggtcttttttccagtttactaatattgtattctgttataaggtccttccattgagtgtttctttctttcttttttcccaaacagcaactcaaaacagacattgagttttaattttggttcctgtactttttatttctagaagttctatttggttatttttcaagtctgctacattattacataattttttaataattttatatctttaatagatagttttttgttttgttttgttttgttttgttttttgagacagagtctcgctttgttgcccaggctggagtgcagtggtgcaatctcagctcacagcaacctccgcctcccaggttcaagtgattcccctgcctcagcctcccaagtagctgggattacaggcacgcatcaccacgcctggctaattttttgtgttttagtagagacagggtttcaccatgttggccaagacagtctcgatctcctgacctcgtgatctgcccacctcggcctcccgaagtcctgggattacagagctgagccactgcgcctggcctttgatagatatttcaagttcatcttttttttttgcttccttaatttttttttttgctataccccatgcctccaagataacagttttttctttttaatttaaatataatacagttttactgtgtatccaagaatatctgaaatctttcgtgggtctctttcttttgtcttttgtatctgttgctttttgctgggctgagcctgcttaaaacaagccccgttagctgtaaaggtttaccttagaaagtcaggtgtcttcctctgtaactctctcccttttccatctgctccaaggcatttatttatattaatcttgacgcaaagggaagttgtgtccacttcaccttggccagtaaggaagcagtgtttggcagatgttgttactcctaataatgccagccagtgagtgaagctgacctgaatgcctcccagggctgaggcaatggcatgatcaccgaagctcaaaccagagacagtttcacctttctgactgaatagtgttcggtgtaggccaaatgcctgcagactactgtttgaggactggtgtggtctaccaggtgtttccttagcgcctggatgtctctggctgccatcccagggatagagcatggtgttagatacgctagatgcctgccgaagtaattatgggtgaaacatatgatgtccaagatttgcttttaaaggctccaatacctcctcccagattccggagggctgtgaaacaattagctatgaaaactggtaattcctgaagctgggtacatgggggttcatgatccctctctcaccttttttgggggagaatgtttgagactttaataagaacttgttgccttttccttttacagggtgttgcaggcatcttcctcaggcctgttttctctgttttccaggctgacgtgatggcagacagggttccccgctgcccggtctgcaccggcgttgtgaagcccgacattgtgttctttggggagccgctgccccagaggttcttgctgcatgtggttgatttccccatggcagatctgctgctcatccttgggacctccctggaggtttgtcagcaggcctgtgcagggaggaggctggagggcaggggaagggaggggtacaggagtcatctcatgggctgtcggcaggcctgtgcagggaggagtctggagggcaggggaagggaggggtacaggagtcacctcatgggctgtcggcaggcctgtgcagggaggaggctggagggcaggggaagggaggggtacaggagtcatctcatgggctgtcggcaggcctgtgcagggaggaggctggagggcaggggaagggaggggtacaggagtcatctcatgggcccttccagggctggtgccactttgggaaggtgaatggattcagctggggttccaggctgagggagcagcagcctgtgcaggagacaggaaggtgggaagctgctgggctttggaggtggtataggtgtgggtggggcaccacgtgtgaggagaagggagaaggatgggggtgtgggggcgaggtggaggggcagggcctcccaggtcagatcaggaatactgatgctgcagtgggaggagtgataaatccacagggactggcccggggacgtagctgcacccttggggtcagggaggcctttggggagtggagagtggagcaagcagtgccaggaggctggtcctggagaaggtggagctgtggtcgcctgagggatggcgaggagggggactggactcgcagtctgtgatgttttggggacgtgagaaggaggcgtctggcttggtctgtaaggtcagggcacttgctggtgaggcgtgatttgggagggaggatgcccagctcggttctgtgtgtgtctgaggtgtcgggaaacatgccctggatgtgttcaagcagctgttctgcgtctgcgtctgcagctcaggaaattcctaaaagctgtgatgagagcaagaaatgagaccatgaagtcagtgtgtgcgtgactggatgtaggcaccgaggacagaagggccagaaagacctgtgctcagaggggcccagggcagccacaggggcccagagcatgtgtttgttcaggcattcattgtgtgctgggccctgctccagtgctttggacatacacggtcagatgtcagtgtaagaagttatatagtttgttaggagatgattgatgttatgagaaagataacaagtaggatagaaaggctagaagggttgggaaccagctgcagtgtcaagtcaggcaggtggagttggatctaagagtttaccgaggtgaggagggtctggcaggggacactgcacaggtgacaagcagcaaggagggtggggcgaagtcagcattgatggccacggggctggagcagagaagaaggtggggcacaagtgtcatctcatgggaggctggcgccacctcagaaggtgaatgggttcagcttgggttccaggccagagtctgaagttgagaggactccgttgggtgctgggctgtgagcccaccatgggggcaagactgggagcagcagacccagcagggcccttgtaggtaatcaccggctggcactggctgggggccaggtaaagccagcagaggctgaggggtgctggagtctgggtgtgtgtgaacgcagagtgggtacgctggcacagtgcatgggaggccgtggattcccaaggaccccagggctgtggctggagcagctggaaagacggagccgccgcttcctgagatggagaagcctggtaggtgggtttgggggagctcaggaactcagccttgtttccacggatttgaggatgtgctgcggactggaggtgttgagcaggtggacatgagtctggagtccaggaaggcccagaggcaggagctggggtgctggagtgagcagacaggagagcccagggtgtggacagacatgagaatgccatgctaggcctaggatggagggacagacacaggaggagcagtcagaggggccatggtggtcagcacagtgtgggctgagaccagctgaccgtgctggccaccaggtgtggacacttgggccaccagccatctttattgttgaagtgaaatgaaaatggcctttttcctgattataagtgtatcatgtgtgtctttgaaaagattcgtacattatataaagatataaagcaaaggatcaactttttaatcccaccaactgttagcattttattctgtgtcctctcagctttcttttttttgtacaaatgcatacgtacagatggtaattttaaactaaaagttggacagcactgtacattctattctgcagcctgctgttttcacgtaacaatgtgagtccatggagatgtgctgcgttgttaatgccaacagtttcccttacacggatatgaggtcccaactgagaaacccatgtctgtaaggctggtgccatcatgaactgaatgagctggtgtcacgcacagactctatctcatgtgctttgtggacgaaatgttaatgtgtttgactgtggagtaccactccagatcccctttaggtgtgacataacgtgggatgtaaaccatatgatcttttctaaaatctcaaaaattctgaaacatattcagccacaagagctttaacatagattttgtggatttaatacaaaatttatgtaagcaatttcttactgatggacaatgataataaatagtatataatttttacattaaaagtaatgctgggccaggcaccgtggctcacacctgttatcccagcactctgggaggccaaggcaggaagattgcctgaagctaggcatttgagaccagcctgggcagtatagtcagacctcgtctctacaaaaaataaaaagatagccaggcatggtctgtgtagttgcagctatttgagaggctgaggaaggaggattgcttgagcccaggaatttgaggttatagtgaactatgatcatgccactgcattccagcctgggtaacagaatgagatcccgtgctgtagtgaatatccctgtgtatcatccttatctactcatgcaagtactcctgaagggtaaatgctgtagtgaatatccctgtgtatcatccttatctacccatgcaagtactctggaagggtaaatgctgataaatactgagaacttgccttccggtgaatatccctgtgtgtcatccttatctacccatgcaagtactcctgaagggtaaatgctgtagtgaatatccctgtgtatcatccttatctacccatgcaagtactctggaagggtaaatgctgataaatactgagaacttgccttccggtgaatatccctgtgtgtcatccttatctacccatgcaagtactcctgaagggtaaatgctgtggtgaatatccctgtgtatcatccttatctacccatgcaagaactcctgaagggtaaatgctgataaatattgagaacttgccttccagaaagatgtaacaattacactgccacaaactgtgtttttatgtagccattttatcacatcctcaccaaaaccaaaatcacacaaatcaaattggttaaaaaatgcatgtgtgtgtgtggaggggggtgcggattttgcctttctgtagtaaagaatgaagttcatcttttcatgtttattgccagttgtgtttcttctctttggattgtatatttgtacctcttgaccatttttcattgggtcattataaattagcaatataaattagttttaattttagtataaattaaataatataattacattttaatgttaatataaacttctttcttttttttttttttttttttgagacagagtcttgctctgtctcccaggctggaggttcagtggcgcgatctcggctcactgcaacctccacctcccaggctcaagccattctcctgcctcaacctcccgagtagctcggattataggtgcgtgccaccacgcccagctaagttttgtatttttagtagagacgtggtttcactatgttggccaggctggtcttgaactcctgacctcagctgatctgcccgcctcggcctcccaaagtgctgggattataggtgtgaaccaccatgcccagctgttaatataaatttcattataaattagcattataaattagttcataaattatatgtttataaatgagtttatcaattagcaatataaactattgtcatatgttgtaaatatttttgcagtttatgatgatgagaggtttttaaaaattttaaattttctacatagtagttttatgtagataccgagataatagtatttacatagtcagatctgtcattttcctttgccttatctgacttcagtttttacgcctagaacgttcttccctatccttacttgtaaatccttagttttcttcaagaactgttttgtttacattgaaacctttaatccatttgaatttttttcagtgggaggtaggaatggagtattttcctcccagataatgagccagttttaatgccatttattaatgtatccatttttttaccttgttcctcttaaaagaagctttgagagctgtatgaagaagcctgatggcaccgagctaggcctctctagaggctgggtggggaagaccatggagagacgtaacagtaactcctgctcgggggcaccagctcgtctgggtgcccgatgctggtggtggctgtcagagcaagcagggctagccagaggagatggacgagtctgtgctgttgtccctctgcgtcatgctgggagacagcgaggtggggaggacagggagaacagaacgtgctcacaaagaggaggcaggaaggttggatccctgatgagccttggaacggaggtggggaaaagcaaggatgtgtggaaacagcaagaagtgggagagagagagagaggcggaggggagaaaaccgtcacggaggccaagcggcaggagctcagctgaagaaatgagattggtggtgggttttccctatatcgcaggctctgactgccaatctgctgctcctccaaggcctcggtggctgtggcatgaaacatcctgaggagcttgtaaagtggacactgtgcccctcacgtttggcccatttttcaggtggagccttttgccagcttgaccgaggccgtgcggagctcagttccccgactgctcatcaaccgggacttggtggggcccttggcttggcatcctcgcagcagggacgtggcccagctgggggacgtggttcacggcgtggaaagcctagtggagcttctgggctggacagaagagatgcgggaccttgtgcagcgggaaactgggaaggtacagactgctgaggaggaccatccaaggggctgcccttctcactgctctagggtatggtccacctgatatggagccccgttggttaacacagtaacagtaatagctgatgatgctgtgaatcctgcaccaggcactacctggacctgactgggtgttactttcaatacctccatttagagatgaggaaacagatgctaacaggccaagcagggacacggtccagacactcagggctgatgagtctgtattcttaacagactataggcgttaccttcactccctaaaataaagcagccaacagtgtccctctaaggcctggtatgtgattctaagatgatacgggttaaagaactttgagaagctaaagttctctgcatctatgtgggatgaaggctacatgagtgatgcttttcggaagtaattggtatgagagccattgatcaattataatccgctgaggaaagccaaagagccttgatgctttctaagagatttcaaaccgcctataaacaagtgaagttacagaaaatgcagtttcccataagaatcatgtagcatgtgtagccttgatattaagggttttcaatgggaggtggtagcattaagcatttaaagtccagtgtcatgattacaggcaggtgtaacactgtccaaaggggatttcaccagtgtattagtctgttctctggctgctcataaaggcatacctgagactgggtaatttataaaggaaagaggtttaatggactcacagttccatatggctgtgggggcctcacaatcatagtggaaggcaaagcaggagcaaagtactgtcttacaaggtggcaggcaagaggacgtgtgcgggggaactgccctttataaaactatcagatcttgtgagacttattcactatcagaagaagagtgtgggaaagacccgcccccatgattcagttacttccacttggccccacccttgacacatggggatgattacaattcaaggtgagatttgggtggggacacagccaaaccatatcaactacaatatatcacagttgatgctcctcttgccttccaaggcagatgtcttaggaaatcctgatcctttttccttgtccacagctgtggctgcctcatggctcagggccatggggtcagcactctcctcacctccaccagtccaagacctccaacctctggttgcaggctgattttttaccaatcatggtcacttcattatggaggcagggaacccagctaacaatgaggcttaaacgctgagaggcgagtgcctcctggccagctcacaaggcagcggagatcttagatcagcccagcaggcttttttgagggatccttttcctgctccaacttcatattttcttttttttgtaatggagtttcactcttgttgcccaagctggagtgcaatggcacgattttggctcactgcagccctgcctcctgggttcaagtgattctcctgcctcagcctcctgagcagctgggattacaggcatgtgccaccatgcctggctaatttctgtacttttattagagatgggatttcatcatgttagtcaggctggtctcaaactcctgacctcgggtgatccacctgcctcagcctcccaaagtgctgggattataggcatgagccagcaggcccggcccaacttcctgttttcatagaaaagcagattgtaactctggtagctcctgtggagttttggaagtggcttaataggatttgaactgtataatctagtttcagagaaatgtatgtaaaatgggttatgatttcattttctgttttttacagcattactatccaaggggttacttttccaaatagtgaatgcttttaagcacatgagcatcagtacatattgatttgggtactttaagacccatagaatgaggctctccatttagccaccctgttctgcccaggcctgctgggatcctcttagcccagcacagcagcagcagtatttgcagaaagcagcttgttttgtgaaatattttgcatgtctgcagctagagctgtttgaacagagatctgctggcctgcctgggtgtgtaaacagatagctgataccctctgtcttctgtattccagcttgatggaccagacaaataggatgatggctgcccccacacaataaatggtaacataggagacatccacatcccaattctgacaagacctcatgcctgaagacagcttgggcaggtgaaaccagaatatgtgaactgagtggacacccgaggctgccactggaatgtcttctcaggccatgagctgcagtgactggtagggctgtgtttacagtcagggccaccccgtcacatatacaaaggagctgcctgcctgtttgctgtgttgaactcttcactctgctgaagctcctaatggaaaaagctttcttctgactgtgaccctcttg

SEQ ID NO: 13983 - DNA, 1395 bp, Homo sapiens
ggaggactccttggactgcgcggaacatggcgttctggggttggcgcgccgcggcagccctccggctgtggggccgggtagttgaacgggtcgaggccgggggaggcgtggggccgtttcaggcctgcggctgtcggctggtgcttggcggcagggacgatgtgagtgcggggctgagaggcagccatggggcccgcggtgagcccttggacccggcgcgccccttgcagaggcctcccagacccgaggtgcccagggcattccggaggcagccgagggcagcagctcccagtttcttcttttcgagatcgccggggagtggcctgtacagcaacctccagcagtacgatctcccgtaccccgaggccatttttgaactcccattcttctttcacaaccccaagccctttttcactttggccaaggagctgtaccctggaaactacaagcccaacgtcactcactactttctccggctgcttcatgacaaggggctgcttctgcggctctacacgcagaacatcgatgggcttgagagagtgtcgggcatccctgcctcaaagctggttgaagctcatggaacctttgcctctgccacctgcacagtctgccaaagacccttcccaggggaggacattcgggctgacgtgatggcagacagggttccccgctgcccggtctgcaccggcgttgtgaagcccgacattgtgttctttggggagccgctgccccagaggttcttgctgcatgtggttgatttccccatggcagatctgctgctcatccttgggacctccctggaggtggagccttttgccagcttgaccgaggccgtgcggagctcagttccccgactgctcatcaaccgggacttggtggggcccttggcttggcatcctcgcagcagggacgtggcccagctgggggacgtggttcacggcgtggaaagcctagtggagcttctgggctggacagaagagatgcgggaccttgtgcagcgggaaactgggaaggtacagactgctgaggaggaccatccaaggggctgcccttctcactgctctaggcttgatggaccagacaaataggatgatggctgcccccacacaataaatggtaacataggagacatccacatcccaattctgacaagacctcatgcctgaagacagcttgggcaggtgaaaccagaatatgtgaactgagtggacacccgaggctgccactggaatgtcttctcaggccatgagctgcagtgactggtagggctgtgtttacagtcagggccaccccgtcacatatacaaaggagctgcctgcctgtttgctgtgttgaactcttcactctgctgaagctcctaatggaaaaagctttcttctgactgtgaccctcttg

SEQ ID NO: 13984 - DNA, 3118 bp, Homo sapiens
ggcgttctggggttggcgcgccgcggcagccctccggctgtggggccgggtagttgaacgggtcgaggccgggggaggcgtggggccgtttcaggcctgcggctgtcggctggtgcttggcggcagggacgatgtgagtgcggggctgagaggcagccatggggcccgcggtgagcccttggacccggcgcgccccttgcagaggcctcccagacccgaggtgcccagggcattccggaggcagccgagggcagcagctcccagtttcttcttttcgaggtattttgggcaaggacaagcacttcttgcgtgttcgttgtcgacacctcgcccactctttctcaccttgccgtgtttcctttgcggcatgtctgggagtttacgtgcgttccaacaccggggcctccgtctttatgctgatctgtggacgtcacttatgggggttttgtcgtttatttcaccattccctcattgaaatacgttctaacctttagttattgtgcatcatgctgtggtgaataaccttgttggcacctcactgtttgcataaattcctagtactgggattgctaggtccaaaagtatatgcatttaacgctttaatgatccctcataaatgttgtgcggttaatactcccactggcatgtgatcgtacccgtctccatagtaattgcatctaagaactgaggctacataggaaaaaatcttaaggtccatggttgttaggtatcagatgccctataatggatgaatatttaagtaaataatggcacattgacttgctgtctgacacaactgctgaaaatgttggtgaaaagtgagtctcgaagtggtagctcacacttgtaataccagcactttcggaggctgagacggggatcgctcgaggccaggagttcaagagcagcctgggcaacataacgagacccccatctctaccaaaaatttaaaaattagccgggcatggtggcgcaagcctgttgtcccagttactcctgagactaaggcaagaggatcccttgagtccaggagttcaaggctgcagtgagctatgattgagccactgcactccagcctgggtgacagagcaagactcttatctacctgtgggaaaaaaaaaagaaaaaagtttaatagatcctgaagagttggccgggcgcggtagctcacgcctgtaatcccagcactttgggaggatgagacgggtggataacgaggtcaggagttcgagaccagctgggccaacatggtgaaaccccatttctactgaaattacaaaaattagccgggcgtggtggcgggcgcctgtaatcctagctactcaggaggcggaggcaggagaatcacttgaacccggaaggcagaggttgcagtgagccgagatggcaccattgcactccagcccgggcgaaagagcaaaaactccgtctcaaaaaaaaacaaagatcccgaagagtcagtcgttcatccaagaagccctgactgagctcttattctgtgccagactctgttctaggtgctatggatggagcagggaccaggacctacaaacacgtggagcgcattctaatatctgtgatactctgcaaaactgttaaaacaaatccttgcggccgggcgcggtggctcacgcctgtaattccagcactttggaaggccgagacgggcggatcacgaggtcaggagatcgagaccatcctggctaacacagtgaaaccccgtctttactaaaaatacaaggaaattagccaggcgtggtggcgggtgcctgtagtcccagctactcgggaggctgaggcaggagaatggcgtgaacctgggaggcggagcttgcagtgagccgagatcgcgacactgcactccagcctgggcaacagagcgagactccgtctcaaaacaaaacaaaacaaaacaaaacaaaaatccttgctaccactggccctaaagcaggaggcatagggctgcgtgtgaggagtagtccattgcatgggcttcctccagtttggctttggatttttgagctctctgaatttgttgtttgtgtcctttgcacagtgtccctcccaggttgcacccatgcctgcccctcagggtcccccactcccagtgaatttcacaccatgcagcatgtactttaagccatacatcttacgtatgttccagacatttggtaaaacgccgtttatgtgtttttcagtgactcacaaacattttatttacgtaaatgaggaatgtactcaggcacccttcgtgataccttgccctcagcaggcactcaacagcaataataactttcattccttttgtgcttctcttaacagttcgtgtttagtaggagcacagtagctgtttggggaacgaccttaagtgaatagatgtctgaaatgctgtgtgaagtggggcgcttaataggtggtgagatggttttagaaccagggttttccctctttgcttcttgactccttaaccagttttcattaggagacccctttggaggtttgcagtcagtcagagttgagtgcctactgagtgtactgaattatgaaatgagcacagttcccattaacctgaattttttgctcccaagtaagtcttgatttctgatttatgactgctttttgttgtaccccaatagtcgtctaagaaaggtgattattttgagaggcctggggagacacacatgctcattctcgagggtggcggtggtgcagagggcagagccatgctcgttcttgctatcctgagattggttgctatctgtttcctttgctgctgtgtttttttctgtcagtattaaaggtggaagaaggtccatatctttttctgtgggtgcttcaagtgttgttggaagtggaggcagcagtgacaaggggaagctttccctgcaggatgtagctgagctgattcgggccagagcctgccagagggtggtggtcatggtgggggccggcatcagcacacccagtggcattccagacttcaggtactgcccacagtcccacctgccttctgcgctcccctcccctgactcctgccctccccactgcccagtttattccacttccctgtcctcttccaaaggcctcagagcctttcttctctccctgcagatcgccg

SEQ ID NO: 13985 - DNA, 430 bp, Homo sapiens
ggcgttctggggttggcgcgccgcggcagccctccggctgtggggccgggtagttgaacgggtcgaggccgggggaggcgtggggccgtttcaggcctgcggctgtcggctggtgcttggcggcagggacgatgtgagtgcggggctgagaggcagccatggggcccgcggtgagcccttggacccggcgcgccccttgcagaggcctcccagacccgaggtgcccagggcattccggaggcagccgagggcagcagctcccagtttcttcttttcgagtgttgttggaagtggaggcagcagtgacaaggggaagctttccctgcaggatgtagctgagctgattcgggccagagcctgccagagggtggtggtcatggtgggggccggcatcagcacacccagtggcattccagacttcagatcgccg

SEQ ID NO: 13986 - DNA, 20149 bp, Homo sapiens
ggaggactccttggactgcgcggaacatggcgttctggggttggcgcgccgcggcagccctccggctgtggggccgggtagttgaacgggtcgaggccgggggaggcgtggggccgtttcaggcctgcggctgtcggctggtgcttggcggcagggacgatgtgagtgcggggctgagaggcagccatggggcccgcggtgagcccttggacccggcgcgccccttgcagaggcctcccagacccgaggtgcccagggcattccggaggcagccgagggcagcagctcccagtttcttcttttcgaggtattttgggcaaggacaagcacttcttgcgtgttcgttgtcgacacctcgcccactctttctcaccttgccgtgtttcctttgcggcatgtctgggagtttacgtgcgttccaacaccggggcctccgtctttatgctgatctgtggacgtcacttatgggggttttgtcgtttatttcaccattccctcattgaaatacgttctaacctttagttattgtgcatcatgctgtggtgaataaccttgttggcacctcactgtttgcataaattcctagtactgggattgctaggtccaaaagtatatgcatttaacgctttaatgatccctcataaatgttgtgcggttaatactcccactggcatgtgatcgtacccgtctccatagtaattgcatctaagaactgaggctacataggaaaaaatcttaaggtccatggttgttaggtatcagatgccctataatggatgaatatttaagtaaataatggcacattgacttgctgtctgacacaactgctgaaaatgttggtgaaaagtgagtctcgaagtggtagctcacacttgtaataccagcactttcggaggctgagacggggatcgctcgaggccaggagttcaagagcagcctgggcaacataacgagacccccatctctaccaaaaatttaaaaattagccgggcatggtggcgcaagcctgttgtcccagttactcctgagactaaggcaagaggatcccttgagtccaggagttcaaggctgcagtgagctatgattgagccactgcactccagcctgggtgacagagcaagactcttatctacctgtgggaaaaaaaaaagaaaaaagtttaatagatcctgaagagttggccgggcgcggtagctcacgcctgtaatcccagcactttgggaggatgagacgggtggataacgaggtcaggagttcgagaccagctgggccaacatggtgaaaccccatttctactgaaattacaaaaattagccgggcgtggtggcgggcgcctgtaatcctagctactcaggaggcggaggcaggagaatcacttgaacccggaaggcagaggttgcagtgagccgagatggcaccattgcactccagcccgggcgaaagagcaaaaactccgtctcaaaaaaaaacaaagatcccgaagagtcagtcgttcatccaagaagccctgactgagctcttattctgtgccagactctgttctaggtgctatggatggagcagggaccaggacctacaaacacgtggagcgcattctaatatctgtgatactctgcaaaactgttaaaacaaatccttgcggccgggcgcggtggctcacgcctgtaattccagcactttggaaggccgagacgggcggatcacgaggtcaggagatcgagaccatcctggctaacacagtgaaaccccgtctttactaaaaatacaaggaaattagccaggcgtggtggcgggtgcctgtagtcccagctactcgggaggctgaggcaggagaatggcgtgaacctgggaggcggagcttgcagtgagccgagatcgcgacactgcactccagcctgggcaacagagcgagactccgtctcaaaacaaaacaaaacaaaacaaaacaaaaatccttgctaccactggccctaaagcaggaggcatagggctgcgtgtgaggagtagtccattgcatgggcttcctccagtttggctttggatttttgagctctctgaatttgttgtttgtgtcctttgcacagtgtccctcccaggttgcacccatgcctgcccctcagggtcccccactcccagtgaatttcacaccatgcagcatgtactttaagccatacatcttacgtatgttccagacatttggtaaaacgccgtttatgtgtttttcagtgactcacaaacattttatttacgtaaatgaggaatgtactcaggcacccttcgtgataccttgccctcagcaggcactcaacagcaataataactttcattccttttgtgcttctcttaacagttcgtgtttagtaggagcacagtagctgtttggggaacgaccttaagtgaatagatgtctgaaatgctgtgtgaagtggggcgcttaataggtggtgagatggttttagaaccagggttttccctctttgcttcttgactccttaaccagttttcattaggagacccctttggaggtttgcagtcagtcagagttgagtgcctactgagtgtactgaattatgaaatgagcacagttcccattaacctgaattttttgctcccaagtaagtcttgatttctgatttatgactgctttttgttgtaccccaatagtcgtctaagaaaggtgattattttgagaggcctggggagacacacatgctcattctcgagggtggcggtggtgcagagggcagagccatgctcgttcttgctatcctgagattggttgctatctgtttcctttgctgctgtgtttttttctgtcagtattaaaggtggaagaaggtccatatctttttctgtgggtgcttcaagtgttgttggaagtggaggcagcagtgacaaggggaagctttccctgcaggatgtagctgagctgattcgggccagagcctgccagagggtggtggtcatggtgggggccggcatcagcacacccagtggcattccagacttcaggtactgcccacagtcccacctgccttctgcgctcccctcccctgactcctgccctccccactgcccagtttattccacttccctgtcctcttccaaaggcctcagagcctttcttctctccctgcagatcgccggggagtggcctgtacagcaacctccagcagtacgatctcccgtaccccgaggccatttttgaactcccattcttctttcacaaccccaagccctttttcactttggccaaggagctgtaccctggaaactacaagcccaacgtcactcactactttctccggctgcttcatgacaaggggctgcttctgcggctctacacgcagaacatcgatgggcttgagagaggtgagccctctgtgagtcgcacacattctttttctcccacggaggctcgggtgcctgtttctcccagggaggctcgggtgcctgtttctcacaggggatgctcgggtgcctgtttctggggacggccaaaacctatcgcttatgcttcttccttgggactttttttgagccaactagttagggctttgttcccaaggaaaatgtcctctgggtgtttaaaggccactgcttgttctcctgcatacctgcagagctgtgtattttgggcagaagttgacattgttttgccaatctggtgtgatgatctctttttttcttctctcttttaagaagtgtattatggaatttttttgagcacacacaaagagagcaatgtaacgaaccgtcctgtcctcatcaccagcacacagccagttcttcctgcgtcctcaccaccttcttccaaatccccagattattttgaagcaaatctctcacatcatgaatttaatctagaaataatctataaacacatgaatggatagctctagagaatactttaaaaacaactccggccgggtgccggattacaggtgtgggatcacacctgtaatcccagcattttgggaggccgaggcaggtagatcacctgaggtcgggagttcgagaccagcctggccaacgtggcaaaaccccgtctctactaaaaatacaaaaaattagccaggcgtggtggtgtgtgcctgtaatcccaggtactcgggaggctgagacaggagaatctcttgaacccagcaggcggaggttgcagtgagccgagatcgtgccacttcactccagcctgggcgacagagggagattctgtctcaaaaaaataaataaaaataaaaataattaaaaaataaaaacaactctgatagtgattcacactgaagaatcactagtaattccttaatatggtcacacttagtctgtggtgatttcttgaccgtatccatatggtgcccaaaccagcgattcacaggttgtgccaacttctggccgtgcacctaacggaagcacttggtggggccttttccttacgtgcagtgatgcagacaggtgctgggacagtcagctctccgggagccaggctcccggagagactgctgatgtgttgtcagttaaaaagaggtggcaccttggctccaggaatgtgtttccttgccagaaggatcccctgacttggaaccacagaggcagcagcggatgccccatgttggtgggctcttctcccagaggtgcagcagggcaggccttgtgggaaggtgggagctcctggctgtgagattcagcactgctgagttagggcagcgacagggacttgggaagcctcctgcagctgggaccctggctgtgccaccgcagcctttcagaaccagttaatactaacacaactttcataagaagtcactttttgtctgtttctaccaagcaattcttttggaatttatgatatttatatcctcattttaacttggtatctgtagaatagaagatatgttcctggatattagatataaatttttgagacagggtcttggctctgttgcccaggctagagtgcagtggcatgatcatagctcactatagcctgaactcttgggccgaagtgatccttttgcctcagcctctggaatagctgggactacgggcatgcactaccatgcctggctaattaaaaaaattttttaagacaagtctcactatgttgctgaggctggtctcaaactcctggcctcaagtgatcctcctgccttggccttccaaagcactgggattacaggcatgagccactgcacccagcctggtattaggtgtaatttttttttttttttttgagacagaatctcgctctcttacccaaactggagtgcggtggcacgacctcagctcactgcaacttccacctcccgggttcaagcgattctcctgtctcagcctccccgagtagctggcactacaggtgcctgccaccacatctggctaatttttgtatttttagtagaggtacggtttcaccatgatggccaggccggtcttgaactcctagcctcaaatgatctgcccacctcggcctcccaaagtgctgggattacaggtgtgggccactgtgcccggctggatataattttatttgagcttttatcaaatggtttttcgtactgagttttgacaggctttgttttaaccgtgatttggctccagctaggtgcccctttgctcccctgccttattctggttgatggcgcatgtaggtgatacgggcatgaaaaccaggcttgaggacatcacaaccccaaggggctgtgcctccttccaggagtcctgccaagcccagaagttgtgctcttggccttgcgtgctcatctcggaggcggcagcaacacttcgctttggcttgaatttcagtgtcgggcatccctgcctcaaagctggttgaagctcatggaacctttgcctctgccacctgcacagtctgccaaagacccttcccaggggaggacattcgggtgagttatcctgctgttggttgtccttctgcagtttgctgttggggtgatctggaaaagtggtattttataagcattgtctcgaaaggacagttgaacaataatagtgtgaaacattttatttgtaaattagaaaatcaatacatgcttgtaaaaaaatttaagacaatatagaaatatgtagggaaaatgaatctcccttcagccaattccagctgcccactttttttttttttttttgagattgagtctcactctgtcgcccaggctggagtgcagtgggcgatctcggctcactgcaacctccgtctcccggattcaaggaattcttctgcctcagcctcctaagtagctgggattacaggcgtgagccaccacgcccggcaatcagatggccttttgtgccgagcttatttcctgaaaatgtttctcgctccttcgccttgtagcttgtgttagtatttcatcctgtttcatggctaaatgttccactgatgtatgcaccacagttggtttgtttgtacatggatgggtgtttgggttgtcccacctttctgctcttgtgtatagttctgctgtggagcatatgcaagtattcgtttgagagtccttgttttttattcttttgagtatgatacctacaagtattgctgggtaactccacgtttagctatatttatttatttattttttgagacacagtcttacactgtcacccaggctggagtgcaatggcgcgatttcggctcaatacaacctctgcctcccgggttcaagcgattctcctgcctcagcctcctgagaagctgggattacaggtgcctgccaccatgcccagctaatgttttttgtatttctagtagagatggggtttcaccatgttggccaggctgctcttgcattcctgacctcaggtggttcacccgcctcggcctcccaaagtgctaagattacaggcgtgagccaccatgccctgcccatgtttaacttttttgtttgtttgttttgagacggagtctagctcttatcaccaggctggagtgcagtggcgcaatctcggctcactgtaccatccgcctcctgggttcaagcgattctcctgcctcagcttcctgagtagctgggactacaggcacacaccaccacgcccggctaatttttgtatttagtagagtagtttcaccatgttggccaggatgtctcgatctcttgacctcgtgatccgcctgcctctttctcccaaagtgtgggattacaggcgagagccactgcgcccggcccgttttaactttttgaggaacgaatatactgttatctgcagaagctggaccattttacattccaccaacagtgggcaagggtttcatcttttccacatcccaacacttactttccattttttaattacagctatcccagtgggtgggaggtggtaacccactgtagcactgattggcattttcctaatgattcatgatatcaaacatctttccatgtgctttttggccatttgtatatctttggagattgaagtcctttgcgcattgtttaattgtgttgtcttttttattgttaagagagtcctttatatattctggaagctagatccttatcagagacatgatttgcaaatattttctgtcattctgtaggttgtcttttttactttgttgatgtcttttgatgcatagaagttttgattttgatgaaatctagtttgtctatttattttctcactcttttggaatcatatctgagaaatggtattgttttactcctgttttcttataagagttttatagtttaaagcttttacatttagttctttgatccattttgagttaatttttgtgtgcgctgtaaggtagggatccagcttcattttcttttatgtggatatgtaattgttccagcaccatttgtttaaaaaaactgtggtcttggcattgttgttgaaaatcagttggccataggtgtatgggttatttctagagtctcaattctattccattgttatctgtatatccttgtgcctgcactataatgttttggttactgtagctttgtagtaagttttgaaattaggaagtgtgagtccagcacatagtagaaacttgatatatacgtattattgttttggtcaactcattcattgaatgaccaatttattcaacaaatagtttagtctcctcagtgccaggccctttgctgggttctgtggatgtgaatagaaattaaaataaggtggagtcatccaacagttacaactgggtgccatacgaattttactataaatatgtactggacactacactgactcagctgtaggaacagagtaggctgggaagcacctttgagatgaggccgtctggatgtaagagtctgtttctggcagcagagacctggagtgtgggaggcctgcttgctctgttagggtttgaactgtatcctgacgatcatgggaggcattggaggatttttaggcaggaaaatgatgtgaagggatttgcatttaaaagagattatttgggactgggcacagtggctcacgcctgtaattccagcactttgggaggcctagacaggcgggtcacctgaggtgggaagcttgagagcagcctgccaaaatggtgaaatcccatctctactaaaaatacaaaaattagccaggtgtggtggtgcacctgtaatcccagctactcaggaggctgaggcagaagaattgcttgaacctgggaggggaggttgctgtgagctgagatcgcaccactgcactccagcctgggtgacagagtgagactccatctcaaaacaaaataaataaataaataagagaataaaatagataatttgggcaacaggttgatgttaattccccacctttgttcttctccttcagtactgtgttggctggtctgaatcttttggcttttcatataaatttctgaaactgttgctatctgttctctgcctgttttatttttgttgttgttgtttggattttttgtttttttgagatagagtcttgctctgttgcccaggctggagtgcagtggtatgatctcagctcattgcaacctccccctctcaggttcaagcgattctcttgcctcatcctcctgagtagctgggattgcaggcatgcgccaccatgcccagctaatttttgtatttttagtagagatggggtttcactatgttggtgaggctggtgtcgaactcctgacctcatgatccacccgcctcggcctcccaaagtgctgggatgacaggcatgagccaccgtgtctggcctctctgcctgttttttaagacttttgtctttggagttttgcggtttctccactgtggttttccatatgaattttcttttatttcttctgcttaaaatttgtaggccagttggtcatggtggctcacgcccgtaatcccagtactttgggaggccgggtgggtggatcgcctgaggtcaggagtttgagaccagcctgaccaacatggagaaaccccatatctactaaaaatacaaaattagccgggcgtgatggtgcatgcctataatctcagatactcgggaggctgaggcaggcgaattgcttgaaccagggaggcggaggttgcggtgagctgagattaggccattgcactccagcctgggaaacaagagcgaaactccatctcaaaaaaaaaaaaataataataataattgtaggccttccttaagaaaaataaaataaaattctaggctgggcgcggtggctcctgcctgtaatcccagtactttgggaagctgaggcgggtggatcacctgagttaggagtttgagaccagcctggccaacatggtgaaaccccgtctctactaaaaatacaaagatgagccatttgtggtggcacccatctgtaatcccagctactcgggaggctgaggcaggagaattgctggaacccaggaggcagaagttgtagtgaaccgagatcatgccactgcactccagcctgggtgacagagcgagatgccatctcaaaaaaataaaatataaaataaaattctaagccctgcaaccaactgaatggagccctccccttggtcaagggaaccccagagaaaccttggaagcttgagttcctggccgtagcaggagaggaggtcagacgcgcctcactgtacccctccctccccagccaccattaggcttcttcactaagggctaaacagaaaccagcccttttcaaagactctacactgctaatgtggattactggtttatcttcccagatacagattaaagacaagatgagattaatggttccttcacccttccctgagaggtctgcttagttctcttcctctgtttccttctatcttaggtaaaatgtacatttactgggcacttactgaagtctcacaagtacgtaaccactcacctcacagccaccctccctctttgaaggaccacatgtaattactaaacctcctgagaacctcttgggacagaaacaagcacagatgtgccgtgactcatgtttttcctgtgggcaccctcaggctggctcagtagccctcacttgcttgagatcctgaatctgcgggttggcgtctttcatggttgctggatcatactctgccgttatctcttcggatatgagttgcccctagcccactatctggcccctctctttagggacctctgattgaacatacattagaccttctctctcctgctgttcctgatcactcttctgtcctgtaattgctgcttcttgtgctgcattctgggtaatttcttctggtcttttttccagtttactaatattgtattctgttataaggtccttccattgagtgtttctttctttcttttttcccaaacagcaactcaaaacagacattgagttttaattttggttcctgtactttttatttctagaagttctatttggttatttttcaagtctgctacattattacataattttttaataattttatatctttaatagatagttttttgttttgttttgttttgttttgttttttgagacagagtctcgctttgttgcccaggctggagtgcagtggtgcaatctcagctcacagcaacctccgcctcccaggttcaagtgattcccctgcctcagcctcccaagtagctgggattacaggcacgcatcaccacgcctggctaattttttgtgttttagtagagacagggtttcaccatgttggccaagacagtctcgatctcctgacctcgtgatctgcccacctcggcctcccgaagtcctgggattacagagctgagccactgcgcctggcctttgatagatatttcaagttcatcttttttttttgcttccttaatttttttttttgctataccccatgcctccaagataacagttttttctttttaatttaaatataatacagttttactgtgtatccaagaatatctgaaatctttcgtgggtctctttcttttgtcttttgtatctgttgctttttgctgggctgagcctgcttaaaacaagccccgttagctgtaaaggtttaccttagaaagtcaggtgtcttcctctgtaactctctcccttttccatctgctccaaggcatttatttatattaatcttgacgcaaagggaagttgtgtccacttcaccttggccagtaaggaagcagtgtttggcagatgttgttactcctaataatgccagccagtgagtgaagctgacctgaatgcctcccagggctgaggcaatggcatgatcaccgaagctcaaaccagagacagtttcacctttctgactgaatagtgttcggtgtaggccaaatgcctgcagactactgtttgaggactggtgtggtctaccaggtgtttccttagcgcctggatgtctctggctgccatcccagggatagagcatggtgttagatacgctagatgcctgccgaagtaattatgggtgaaacatatgatgtccaagatttgcttttaaaggctccaatacctcctcccagattccggagggctgtgaaacaattagctatgaaaactggtaattcctgaagctgggtacatgggggttcatgatccctctctcaccttttttgggggagaatgtttgagactttaataagaacttgttgccttttccttttacagggtgttgcaggcatcttcctcaggcctgttttctctgttttccaggctgacgtgatggcagacagggttccccgctgcccggtctgcaccggcgttgtgaagcccgacattgtgttctttggggagccgctgccccagaggttcttgctgcatgtggttgatttccccatggcagatctgctgctcatccttgggacctccctggaggtttgtcagcaggcctgtgcagggaggaggctggagggcaggggaagggaggggtacaggagtcatctcatgggctgtcggcaggcctgtgcagggaggagtctggagggcaggggaagggaggggtacaggagtcacctcatgggctgtcggcaggcctgtgcagggaggaggctggagggcaggggaagggaggggtacaggagtcatctcatgggctgtcggcaggcctgtgcagggaggaggctggagggcaggggaagggaggggtacaggagtcatctcatgggcccttccagggctggtgccactttgggaaggtgaatggattcagctggggttccaggctgagggagcagcagcctgtgcaggagacaggaaggtgggaagctgctgggctttggaggtggtataggtgtgggtggggcaccacgtgtgaggagaagggagaaggatgggggtgtgggggcgaggtggaggggcagggcctcccaggtcagatcaggaatactgatgctgcagtgggaggagtgataaatccacagggactggcccggggacgtagctgcacccttggggtcagggaggcctttggggagtggagagtggagcaagcagtgccaggaggctggtcctggagaaggtggagctgtggtcgcctgagggatggcgaggagggggactggactcgcagtctgtgatgttttggggacgtgagaaggaggcgtctggcttggtctgtaaggtcagggcacttgctggtgaggcgtgatttgggagggaggatgcccagctcggttctgtgtgtgtctgaggtgtcgggaaacatgccctggatgtgttcaagcagctgttctgcgtctgcgtctgcagctcaggaaattcctaaaagctgtgatgagagcaagaaatgagaccatgaagtcagtgtgtgcgtgactggatgtaggcaccgaggacagaagggccagaaagacctgtgctcagaggggcccagggcagccacaggggcccagagcatgtgtttgttcaggcattcattgtgtgctgggccctgctccagtgctttggacatacacggtcagatgtcagtgtaagaagttatatagtttgttaggagatgattgatgttatgagaaagataacaagtaggatagaaaggctagaagggttgggaaccagctgcagtgtcaagtcaggcaggtggagttggatctaagagtttaccgaggtgaggagggtctggcaggggacactgcacaggtgacaagcagcaaggagggtggggcgaagtcagcattgatggccacggggctggagcagagaagaaggtggggcacaagtgtcatctcatgggaggctggcgccacctcagaaggtgaatgggttcagcttgggttccaggccagagtctgaagttgagaggactccgttgggtgctgggctgtgagcccaccatgggggcaagactgggagcagcagacccagcagggcccttgtaggtaatcaccggctggcactggctgggggccaggtaaagccagcagaggctgaggggtgctggagtctgggtgtgtgtgaacgcagagtgggtacgctggcacagtgcatgggaggccgtggattcccaaggaccccagggctgtggctggagcagctggaaagacggagccgccgcttcctgagatggagaagcctggtaggtgggtttgggggagctcaggaactcagccttgtttccacggatttgaggatgtgctgcggactggaggtgttgagcaggtggacatgagtctggagtccaggaaggcccagaggcaggagctggggtgctggagtgagcagacaggagagcccagggtgtggacagacatgagaatgccatgctaggcctaggatggagggacagacacaggaggagcagtcagaggggccatggtggtcagcacagtgtgggctgagaccagctgaccgtgctggccaccaggtgtggacacttgggccaccagccatctttattgttgaagtgaaatgaaaatggcctttttcctgattataagtgtatcatgtgtgtctttgaaaagattcgtacattatataaagatataaagcaaaggatcaactttttaatcccaccaactgttagcattttattctgtgtcctctcagctttcttttttttgtacaaatgcatacgtacagatggtaattttaaactaaaagttggacagcactgtacattctattctgcagcctgctgttttcacgtaacaatgtgagtccatggagatgtgctgcgttgttaatgccaacagtttcccttacacggatatgaggtcccaactgagaaacccatgtctgtaaggctggtgccatcatgaactgaatgagctggtgtcacgcacagactctatctcatgtgctttgtggacgaaatgttaatgtgtttgactgtggagtaccactccagatcccctttaggtgtgacataacgtgggatgtaaaccatatgatcttttctaaaatctcaaaaattctgaaacatattcagccacaagagctttaacatagattttgtggatttaatacaaaatttatgtaagcaatttcttactgatggacaatgataataaatagtatataatttttacattaaaagtaatgctgggccaggcaccgtggctcacacctgttatcccagcactctgggaggccaaggcaggaagattgcctgaagctaggcatttgagaccagcctgggcagtatagtcagacctcgtctctacaaaaaataaaaagatagccaggcatggtctgtgtagttgcagctatttgagaggctgaggaaggaggattgcttgagcccaggaatttgaggttatagtgaactatgatcatgccactgcattccagcctgggtaacagaatgagatcccgtgctgtagtgaatatccctgtgtatcatccttatctactcatgcaagtactcctgaagggtaaatgctgtagtgaatatccctgtgtatcatccttatctacccatgcaagtactctggaagggtaaatgctgataaatactgagaacttgccttccggtgaatatccctgtgtgtcatccttatctacccatgcaagtactcctgaagggtaaatgctgtagtgaatatccctgtgtatcatccttatctacccatgcaagtactctggaagggtaaatgctgataaatactgagaacttgccttccggtgaatatccctgtgtgtcatccttatctacccatgcaagtactcctgaagggtaaatgctgtggtgaatatccctgtgtatcatccttatctacccatgcaagaactcctgaagggtaaatgctgataaatattgagaacttgccttccagaaagatgtaacaattacactgccacaaactgtgtttttatgtagccattttatcacatcctcaccaaaaccaaaatcacacaaatcaaattggttaaaaaatgcatgtgtgtgtgtggaggggggtgcggattttgcctttctgtagtaaagaatgaagttcatcttttcatgtttattgccagttgtgtttcttctctttggattgtatatttgtacctcttgaccatttttcattgggtcattataaattagcaatataaattagttttaattttagtataaattaaataatataattacattttaatgttaatataaacttctttcttttttttttttttttttttgagacagagtcttgctctgtctcccaggctggaggttcagtggcgcgatctcggctcactgcaacctccacctcccaggctcaagccattctcctgcctcaacctcccgagtagctcggattataggtgcgtgccaccacgcccagctaagttttgtatttttagtagagacgtggtttcactatgttggccaggctggtcttgaactcctgacctcagctgatctgcccgcctcggcctcccaaagtgctgggattataggtgtgaaccaccatgcccagctgttaatataaatttcattataaattagcattataaattagttcataaattatatgtttataaatgagtttatcaattagcaatataaactattgtcatatgttgtaaatatttttgcagtttatgatgatgagaggtttttaaaaattttaaattttctacatagtagttttatgtagataccgagataatagtatttacatagtcagatctgtcattttcctttgccttatctgacttcagtttttacgcctagaacgttcttccctatccttacttgtaaatccttagttttcttcaagaactgttttgtttacattgaaacctttaatccatttgaatttttttcagtgggaggtaggaatggagtattttcctcccagataatgagccagttttaatgccatttattaatgtatccatttttttaccttgttcctcttaaaagaagctttgagagctgtatgaagaagcctgatggcaccgagctaggcctctctagaggctgggtggggaagaccatggagagacgtaacagtaactcctgctcgggggcaccagctcgtctgggtgcccgatgctggtggtggctgtcagagcaagcagggctagccagaggagatggacgagtctgtgctgttgtccctctgcgtcatgctgggagacagcgaggtggggaggacagggagaacagaacgtgctcacaaagaggaggcaggaaggttggatccctgatgagccttggaacggaggtggggaaaagcaaggatgtgtggaaacagcaagaagtgggagagagagagagaggcggaggggagaaaaccgtcacggaggccaagcggcaggagctcagctgaagaaatgagattggtggtgggttttccctatatcgcaggctctgactgccaatctgctgctcctccaaggcctcggtggctgtggcatgaaacatcctgaggagcttgtaaagtggacactgtgcccctcacgtttggcccatttttcaggtggagccttttgccagcttgaccgaggccgtgcggagctcagttccccgactgctcatcaaccgggacttggtggggcccttggcttggcatcctcgcagcagggacgtggcccagctgggggacgtggttcacggcgtggaaagcctagtggagcttctgggctggacagaagagatgcgggaccttgtgcagcgggaaactgggaaggtacagactgctgaggaggaccatccaaggggctgcccttctcactgctctagggtatggtccacctgatatggagccccgttggttaacacagtaacagtaatagctgatgatgctgtgaatcctgcaccaggcactacctggacctgactgggtgttactttcaatacctccatttagagatgaggaaacagatgctaacaggccaagcagggacacggtccagacactcagggctgatgagtctgtattcttaacagactataggcgttaccttcactccctaaaataaagcagccaacagtgtccctctaaggcctggtatgtgattctaagatgatacgggttaaagaactttgagaagctaaagttctctgcatctatgtgggatgaaggctacatgagtgatgcttttcggaagtaattggtatgagagccattgatcaattataatccgctgaggaaagccaaagagccttgatgctttctaagagatttcaaaccgcctataaacaagtgaagttacagaaaatgcagtttcccataagaatcatgtagcatgtgtagccttgatattaagggttttcaatgggaggtggtagcattaagcatttaaagtccagtgtcatgattacaggcaggtgtaacactgtccaaaggggatttcaccagtgtattagtctgttctctggctgctcataaaggcatacctgagactgggtaatttataaaggaaagaggtttaatggactcacagttccatatggctgtgggggcctcacaatcatagtggaaggcaaagcaggagcaaagtactgtcttacaaggtggcaggcaagaggacgtgtgcgggggaactgccctttataaaactatcagatcttgtgagacttattcactatcagaagaagagtgtgggaaagacccgcccccatgattcagttacttccacttggccccacccttgacacatggggatgattacaattcaaggtgagatttgggtggggacacagccaaaccatatcaactacaatatatcacagttgatgctcctcttgccttccaaggcagatgtcttaggaaatcctgatcctttttccttgtccacagctgtggctgcctcatggctcagggccatggggtcagcactctcctcacctccaccagtccaagacctccaacctctggttgcaggctgattttttaccaatcatggtcacttcattatggaggcagggaacccagctaacaatgaggcttaaacgctgagaggcgagtgcctcctggccagctcacaaggcagcggagatcttagatcagcccagcaggcttttttgagggatccttttcctgctccaacttcatattttcttttttttgtaatggagtttcactcttgttgcccaagctggagtgcaatggcacgattttggctcactgcagccctgcctcctgggttcaagtgattctcctgcctcagcctcctgagcagctgggattacaggcatgtgccaccatgcctggctaatttctgtacttttattagagatgggatttcatcatgttagtcaggctggtctcaaactcctgacctcgggtgatccacctgcctcagcctcccaaagtgctgggattataggcatgagccagcaggcccggcccaacttcctgttttcatagaaaagcagattgtaactctggtagctcctgtggagttttggaagtggcttaataggatttgaactgtataatctagtttcagagaaatgtatgtaaaatgggttatgatttcattttctgttttttacagcattactatccaaggggttacttttccaaatagtgaatgcttttaagcacatgagcatcagtacatattgatttgggtactttaagacccatagaatgaggctctccatttagccaccctgttctgcccaggcctgctgggatcctcttagcccagcacagcagcagcagtatttgcagaaagcagcttgttttgtgaaatattttgcatgtctgcagctagagctgtttgaacagagatctgctggcctgcctgggtgtgtaaacagatagctgataccctctgtcttctgtattccagcttgatggaccagacaaataggatgatggctgcccccacacaataaatggtaacataggagacatccacatcccaattctgacaagacctcatgcctgaagacagcttgggcaggtgaaaccagaatatgtgaactgagtggacacccgaggctgccactggaatgtcttctcaggccatgagctgcagtgactggtagggctgtgtttacagtcagggccaccccgtcacatatacaaaggagctgcctgcctgtttgctgtgttgaactcttcactctgctgaagctcctaatggaaaaagctttcttctgactgtgaccctcttgaactgaatcagaccaactggaatcccagaccgagtctgctttctgtgcctagttgaacggcaagctcggcatctgttggttacaagatccagacttgggccgagcggtccccagccctcttcatgttccgaagtgtagtcttgaggccctggtgccgcacttctagcatgttggtctcctttagt

SEQ ID NO: 13987 - DNA, 1475 bp, Homo sapiens
ggaggactccttggactgcgcggaacatggcgttctggggttggcgcgccgcggcagccctccggctgtggggccgggtagttgaacgggtcgaggccgggggaggcgtggggccgtttcaggcctgcggctgtcggctggtgcttggcggcagggacgatgatgtagctgagctgattcgggccagagcctgccagagggtggtggtcatggtgggggccggcatcagcacacccagtggcattccagacttcagatcgccggggagtggcctgtacagcaacctccagcagtacgatctcccgtaccccgaggccatttttgaactcccattcttctttcacaaccccaagccctttttcactttggccaaggagctgtaccctggaaactacaagcccaacgtcactcactactttctccggctgcttcatgacaaggggctgcttctgcggctctacacgcagaacatcgatgggcttgagagagtgtcgggcatccctgcctcaaagctggttgaagctcatggaacctttgcctctgccacctgcacagtctgccaaagacccttcccaggggaggacattcgggctgacgtgatggcagacagggttccccgctgcccggtctgcaccggcgttgtgaagcccgacattgtgttctttggggagccgctgccccagaggttcttgctgcatgtggttgatttccccatggcagatctgctgctcatccttgggacctccctggaggtggagccttttgccagcttgaccgaggccgtgcggagctcagttccccgactgctcatcaaccgggacttggtggggcccttggcttggcatcctcgcagcagggacgtggcccagctgggggacgtggttcacggcgtggaaagcctagtggagcttctgggctggacagaagagatgcgggaccttgtgcagcgggaaactgggaagcttgatggaccagacaaataggatgatggctgcccccacacaataaatggtaacataggagacatccacatcccaattctgacaagacctcatgcctgaagacagcttgggcaggtgaaaccagaatatgtgaactgagtggacacccgaggctgccactggaatgtcttctcaggccatgagctgcagtgactggtagggctgtgtttacagtcagggccaccccgtcacatatacaaaggagctgcctgcctgtttgctgtgttgaactcttcactctgctgaagctcctaatggaaaaagctttcttctgactgtgaccctcttgaactgaatcagaccaactggaatcccagaccgagtctgctttctgtgcctagttgaacggcaagctcggcatctgttggttacaagatccagacttgggccgagcggtccccagccctcttcatgttccgaagtgtagtcttgaggccctggtgccgcacttctagcatgttggtctcctttagt

SEQ ID NO: 13988 - DNA, 492 bp, Homo sapiens
agaaaggtgattattttgagaggcctggggagacacacatgctcattctcgagggtggcggtggtgcagagggcagagccatgctcgttcttgctatcctgagattggttgctatctgtttcctttgctgctgtgtttttttctgtcagtattaaaggtggaagaaggtccatatctttttctgtgggtgcttcaagtgttgttggaagtggaggcagcagtgacaaggggaagctttccctgcaggatgtagctgagctgattcgggccagagcctgccagagggtggtggtcatggtgggggccggcatcagcacacccagtggcattccagacttcaggtactgcccacagtcccacctgccttctgcgctcccctcccctgactcctgccctccccactgcccagtttattccacttccctgtcctcttccaaaggcctcagagcctttcttctctccctgcagatcgccggggagtggcctgtacag

SEQ ID NO: 13989 - DNA, 365 bp, Homo sapiens
agaaaggtgattattttgagaggcctggggagacacacatgctcattctcgagggtggcggtggtgcagagggcagagccatgctcgttcttgctatcctgagattggttgctatctgtttcctttgctgctgtgtttttttctgtcagtattaaaggtggaagaaggtccatatctttttctgtgggtgcttcaagtgttgttggaagtggaggcagcagtgacaaggggaagctttccctgcaggatgtagctgagctgattcgggccagagcctgccagagggtggtggtcatggtgggggccggcatcagcacacccagtggcattccagacttcagatcgccggggagtggcctgtacag

SEQ ID NO: 13990 - DNA, 12164 bp, Homo sapiens
acatggcgttctggggttggcgcgccgcggcagccctccggctgtggggccgggtagttgaacgggtcgaggccgggggaggcgtggggccgtttcaggcctgcggctgtcggctggtgcttggcggcagggacgatgtgagtgcggggctgagaggcagccatggggcccgcggtgagcccttggacccggcgcgccccttgcagaggcctcccagacccgaggtgcccagggcattccggaggcagccgagggcagcagctcccagtttcttcttttcgaggtattttgggcaaggacaagcacttcttgcgtgttcgttgtcgacacctcgcccactctttctcaccttgccgtgtttcctttgcggcatgtctgggagtttacgtgcgttccaacaccggggcctccgtctttatgctgatctgtggacgtcacttatgggggttttgtcgtttatttcaccattccctcattgaaatacgttctaacctttagttattgtgcatcatgctgtggtgaataaccttgttggcacctcactgtttgcataaattcctagtactgggattgctaggtccaaaagtatatgcatttaacgctttaatgatccctcataaatgttgtgcggttaatactcccactggcatgtgatcgtacccgtctccatagtaattgcatctaagaactgaggctacataggaaaaaatcttaaggtccatggttgttaggtatcagatgccctataatggatgaatatttaagtaaataatggcacattgacttgctgtctgacacaactgctgaaaatgttggtgaaaagtgagtctcgaagtggtagctcacacttgtaataccagcactttcggaggctgagacggggatcgctcgaggccaggagttcaagagcagcctgggcaacataacgagacccccatctctaccaaaaatttaaaaattagccgggcatggtggcgcaagcctgttgtcccagttactcctgagactaaggcaagaggatcccttgagtccaggagttcaaggctgcagtgagctatgattgagccactgcactccagcctgggtgacagagcaagactcttatctacctgtgggaaaaaaaaaagaaaaaagtttaatagatcctgaagagttggccgggcgcggtagctcacgcctgtaatcccagcactttgggaggatgagacgggtggataacgaggtcaggagttcgagaccagctgggccaacatggtgaaaccccatttctactgaaattacaaaaattagccgggcgtggtggcgggcgcctgtaatcctagctactcaggaggcggaggcaggagaatcacttgaacccggaaggcagaggttgcagtgagccgagatggcaccattgcactccagcccgggcgaaagagcaaaaactccgtctcaaaaaaaaacaaagatcccgaagagtcagtcgttcatccaagaagccctgactgagctcttattctgtgccagactctgttctaggtgctatggatggagcagggaccaggacctacaaacacgtggagcgcattctaatatctgtgatactctgcaaaactgttaaaacaaatccttgcggccgggcgcggtggctcacgcctgtaattccagcactttggaaggccgagacgggcggatcacgaggtcaggagatcgagaccatcctggctaacacagtgaaaccccgtctttactaaaaatacaaggaaattagccaggcgtggtggcgggtgcctgtagtcccagctactcgggaggctgaggcaggagaatggcgtgaacctgggaggcggagcttgcagtgagccgagatcgcgacactgcactccagcctgggcaacagagcgagactccgtctcaaaacaaaacaaaacaaaacaaaacaaaaatccttgctaccactggccctaaagcaggaggcatagggctgcgtgtgaggagtagtccattgcatgggcttcctccagtttggctttggatttttgagctctctgaatttgttgtttgtgtcctttgcacagtgtccctcccaggttgcacccatgcctgcccctcagggtcccccactcccagtgaatttcacaccatgcagcatgtactttaagccatacatcttacgtatgttccagacatttggtaaaacgccgtttatgtgtttttcagtgactcacaaacattttatttacgtaaatgaggaatgtactcaggcacccttcgtgataccttgccctcagcaggcactcaacagcaataataactttcattccttttgtgcttctcttaacagttcgtgtttagtaggagcacagtagctgtttggggaacgaccttaagtgaatagatgtctgaaatgctgtgtgaagtggggcgcttaataggtggtgagatggttttagaaccagggttttccctctttgcttcttgactccttaaccagttttcattaggagacccctttggaggtttgcagtcagtcagagttgagtgcctactgagtgtactgaattatgaaatgagcacagttcccattaacctgaattttttgctcccaagtaagtcttgatttctgatttatgactgctttttgttgtaccccaatagtcgtctaagaaaggtgattattttgagaggcctggggagacacacatgctcattctcgagggtggcggtggtgcagagggcagagccatgctcgttcttgctatcctgagattggttgctatctgtttcctttgctgctgtgtttttttctgtcagtattaaaggtggaagaaggtccatatctttttctgtgggtgcttcaagtgttgttggaagtggaggcagcagtgacaaggggaagctttccctgcaggatgtagctgagctgattcgggccagagcctgccagagggtggtggtcatggtgggggccggcatcagcacacccagtggcattccagacttcaggtactgcccacagtcccacctgccttctgcgctcccctcccctgactcctgccctccccactgcccagtttattccacttccctgtcctcttccaaaggcctcagagcctttcttctctccctgcagatcgccggggagtggcctgtacagcaacctccagcagtacgatctcccgtaccccgaggccatttttgaactcccattcttctttcacaaccccaagccctttttcactttggccaaggagctgtaccctggaaactacaagcccaacgtcactcactactttctccggctgcttcatgacaaggggctgcttctgcggctctacacgcagaacatcgatgggcttgagagaggtgagccctctgtgagtcgcacacattctttttctcccacggaggctcgggtgcctgtttctcccagggaggctcgggtgcctgtttctcacaggggatgctcgggtgcctgtttctggggacggccaaaacctatcgcttatgcttcttccttgggactttttttgagccaactagttagggctttgttcccaaggaaaatgtcctctgggtgtttaaaggccactgcttgttctcctgcatacctgcagagctgtgtattttgggcagaagttgacattgttttgccaatctggtgtgatgatctctttttttcttctctcttttaagaagtgtattatggaatttttttgagcacacacaaagagagcaatgtaacgaaccgtcctgtcctcatcaccagcacacagccagttcttcctgcgtcctcaccaccttcttccaaatccccagattattttgaagcaaatctctcacatcatgaatttaatctagaaataatctataaacacatgaatggatagctctagagaatactttaaaaacaactccggccgggtgccggattacaggtgtgggatcacacctgtaatcccagcattttgggaggccgaggcaggtagatcacctgaggtcgggagttcgagaccagcctggccaacgtggcaaaaccccgtctctactaaaaatacaaaaaattagccaggcgtggtggtgtgtgcctgtaatcccaggtactcgggaggctgagacaggagaatctcttgaacccagcaggcggaggttgcagtgagccgagatcgtgccacttcactccagcctgggcgacagagggagattctgtctcaaaaaaataaataaaaataaaaataattaaaaaataaaaacaactctgatagtgattcacactgaagaatcactagtaattccttaatatggtcacacttagtctgtggtgatttcttgaccgtatccatatggtgcccaaaccagcgattcacaggttgtgccaacttctggccgtgcacctaacggaagcacttggtggggccttttccttacgtgcagtgatgcagacaggtgctgggacagtcagctctccgggagccaggctcccggagagactgctgatgtgttgtcagttaaaaagaggtggcaccttggctccaggaatgtgtttccttgccagaaggatcccctgacttggaaccacagaggcagcagcggatgccccatgttggtgggctcttctcccagaggtgcagcagggcaggccttgtgggaaggtgggagctcctggctgtgagattcagcactgctgagttagggcagcgacagggacttgggaagcctcctgcagctgggaccctggctgtgccaccgcagcctttcagaaccagttaatactaacacaactttcataagaagtcactttttgtctgtttctaccaagcaattcttttggaatttatgatatttatatcctcattttaacttggtatctgtagaatagaagatatgttcctggatattagatataaatttttgagacagggtcttggctctgttgcccaggctagagtgcagtggcatgatcatagctcactatagcctgaactcttgggccgaagtgatccttttgcctcagcctctggaatagctgggactacgggcatgcactaccatgcctggctaattaaaaaaattttttaagacaagtctcactatgttgctgaggctggtctcaaactcctggcctcaagtgatcctcctgccttggccttccaaagcactgggattacaggcatgagccactgcacccagcctggtattaggtgtaatttttttttttttttttgagacagaatctcgctctcttacccaaactggagtgcggtggcacgacctcagctcactgcaacttccacctcccgggttcaagcgattctcctgtctcagcctccccgagtagctggcactacaggtgcctgccaccacatctggctaatttttgtatttttagtagaggtacggtttcaccatgatggccaggccggtcttgaactcctagcctcaaatgatctgcccacctcggcctcccaaagtgctgggattacaggtgtgggccactgtgcccggctggatataattttatttgagcttttatcaaatggtttttcgtactgagttttgacaggctttgttttaaccgtgatttggctccagctaggtgcccctttgctcccctgccttattctggttgatggcgcatgtaggtgatacgggcatgaaaaccaggcttgaggacatcacaaccccaaggggctgtgcctccttccaggagtcctgccaagcccagaagttgtgctcttggccttgcgtgctcatctcggaggcggcagcaacacttcgctttggcttgaatttcagtgtcgggcatccctgcctcaaagctggttgaagctcatggaacctttgcctctgccacctgcacagtctgccaaagacccttcccaggggaggacattcgggtgagttatcctgctgttggttgtccttctgcagtttgctgttggggtgatctggaaaagtggtattttataagcattgtctcgaaaggacagttgaacaataatagtgtgaaacattttatttgtaaattagaaaatcaatacatgcttgtaaaaaaatttaagacaatatagaaatatgtagggaaaatgaatctcccttcagccaattccagctgcccactttttttttttttttttgagattgagtctcactctgtcgcccaggctggagtgcagtgggcgatctcggctcactgcaacctccgtctcccggattcaaggaattcttctgcctcagcctcctaagtagctgggattacaggcgtgagccaccacgcccggcaatcagatggccttttgtgccgagcttatttcctgaaaatgtttctcgctccttcgccttgtagcttgtgttagtatttcatcctgtttcatggctaaatgttccactgatgtatgcaccacagttggtttgtttgtacatggatgggtgtttgggttgtcccacctttctgctcttgtgtatagttctgctgtggagcatatgcaagtattcgtttgagagtccttgttttttattcttttgagtatgatacctacaagtattgctgggtaactccacgtttagctatatttatttatttattttttgagacacagtcttacactgtcacccaggctggagtgcaatggcgcgatttcggctcaatacaacctctgcctcccgggttcaagcgattctcctgcctcagcctcctgagaagctgggattacaggtgcctgccaccatgcccagctaatgttttttgtatttctagtagagatggggtttcaccatgttggccaggctgctcttgcattcctgacctcaggtggttcacccgcctcggcctcccaaagtgctaagattacaggcgtgagccaccatgccctgcccatgtttaacttttttgtttgtttgttttgagacggagtctagctcttatcaccaggctggagtgcagtggcgcaatctcggctcactgtaccatccgcctcctgggttcaagcgattctcctgcctcagcttcctgagtagctgggactacaggcacacaccaccacgcccggctaatttttgtatttagtagagtagtttcaccatgttggccaggatgtctcgatctcttgacctcgtgatccgcctgcctctttctcccaaagtgtgggattacaggcgagagccactgcgcccggcccgttttaactttttgaggaacgaatatactgttatctgcagaagctggaccattttacattccaccaacagtgggcaagggtttcatcttttccacatcccaacacttactttccattttttaattacagctatcccagtgggtgggaggtggtaacccactgtagcactgattggcattttcctaatgattcatgatatcaaacatctttccatgtgctttttggccatttgtatatctttggagattgaagtcctttgcgcattgtttaattgtgttgtcttttttattgttaagagagtcctttatatattctggaagctagatccttatcagagacatgatttgcaaatattttctgtcattctgtaggttgtcttttttactttgttgatgtcttttgatgcatagaagttttgattttgatgaaatctagtttgtctatttattttctcactcttttggaatcatatctgagaaatggtattgttttactcctgttttcttataagagttttatagtttaaagcttttacatttagttctttgatccattttgagttaatttttgtgtgcgctgtaaggtagggatccagcttcattttcttttatgtggatatgtaattgttccagcaccatttgtttaaaaaaactgtggtcttggcattgttgttgaaaatcagttggccataggtgtatgggttatttctagagtctcaattctattccattgttatctgtatatccttgtgcctgcactataatgttttggttactgtagctttgtagtaagttttgaaattaggaagtgtgagtccagcacatagtagaaacttgatatatacgtattattgttttggtcaactcattcattgaatgaccaatttattcaacaaatagtttagtctcctcagtgccaggccctttgctgggttctgtggatgtgaatagaaattaaaataaggtggagtcatccaacagttacaactgggtgccatacgaattttactataaatatgtactggacactacactgactcagctgtaggaacagagtaggctgggaagcacctttgagatgaggccgtctggatgtaagagtctgtttctggcagcagagacctggagtgtgggaggcctgcttgctctgttagggtttgaactgtatcctgacgatcatgggaggcattggaggatttttaggcaggaaaatgatgtgaagggatttgcatttaaaagagattatttgggactgggcacagtggctcacgcctgtaattccagcactttgggaggcctagacaggcgggtcacctgaggtgggaagcttgagagcagcctgccaaaatggtgaaatcccatctctactaaaaatacaaaaattagccaggtgtggtggtgcacctgtaatcccagctactcaggaggctgaggcagaagaattgcttgaacctgggaggggaggttgctgtgagctgagatcgcaccactgcactccagcctgggtgacagagtgagactccatctcaaaacaaaataaataaataaataagagaataaaatagataatttgggcaacaggttgatgttaattccccacctttgttcttctccttcagtactgtgttggctggtctgaatcttttggcttttcatataaatttctgaaactgttgctatctgttctctgcctgttttatttttgttgttgttgtttggattttttgtttttttgagatagagtcttgctctgttgcccaggctggagtgcagtggtatgatctcagctcattgcaacctccccctctcaggttcaagcgattctcttgcctcatcctcctgagtagctgggattgcaggcatgcgccaccatgcccagctaatttttgtatttttagtagagatggggtttcactatgttggtgaggctggtgtcgaactcctgacctcatgatccacccgcctcggcctcccaaagtgctgggatgacaggcatgagccaccgtgtctggcctctctgcctgttttttaagacttttgtctttggagttttgcggtttctccactgtggttttccatatgaattttcttttatttcttctgcttaaaatttgtaggccagttggtcatggtggctcacgcccgtaatcccagtactttgggaggccgggtgggtggatcgcctgaggtcaggagtttgagaccagcctgaccaacatggagaaaccccatatctactaaaaatacaaaattagccgggcgtgatggtgcatgcctataatctcagatactcgggaggctgaggcaggcgaattgcttgaaccagggaggcggaggttgcggtgagctgagattaggccattgcactccagcctgggaaacaagagcgaaactccatctcaaaaaaaaaaaaataataataataattgtaggccttccttaagaaaaataaaataaaattctaggctgggcgcggtggctcctgcctgtaatcccagtactttgggaagctgaggcgggtggatcacctgagttaggagtttgagaccagcctggccaacatggtgaaaccccgtctctactaaaaatacaaagatgagccatttgtggtggcacccatctgtaatcccagctactcgggaggctgaggcaggagaattgctggaacccaggaggcagaagttgtagtgaaccgagatcatgccactgcactccagcctgggtgacagagcgagatgccatctcaaaaaaataaaatataaaataaaattctaagccctgcaaccaactgaatggagccctccccttggtcaagggaaccccagagaaaccttggaagcttgagttcctggccgtagcaggagaggaggtcagacgcgcctcactgtacccctccctccccagccaccattaggcttcttcactaagggctaaacagaaaccagcccttttcaaagactctacactgctaatgtggattactggtttatcttcccagatacagattaaagacaagatgagattaatggttccttcacccttccctgagaggtctgcttagttctcttcctctgtttccttctatcttaggtaaaatgtacatttactgggcacttactgaagtctcacaagtacgtaaccactcacctcacagccaccctccctctttgaaggaccacatgtaattactaaacctcctgagaacctcttgggacagaaacaagcacagatgtgccgtgactcatgtttttcctgtgggcaccctcaggctggctcagtagccctcacttgcttgagatcctgaatctgcgggttggcgtctttcatggttgctggatcatactctgccgttatctcttcggatatgagttgcccctagcccactatctggcccctctctttagggacctctgattgaacatacattagaccttctctctcctgctgttcctgatcactcttctgtcctgtaattgctgcttcttgtgctgcattctgggtaatttcttctggtcttttttccagtttactaatattgtattctgttataaggtccttccattgagtgtttctttctttcttttttcccaaacagcaactcaaaacagacattgagttttaattttggttcctgtactttttatttctagaagttctatttggttatttttcaagtctgctacattattacataattttttaataattttatatctttaatagatagttttttgttttgttttgttttgttttgttttttgagacagagtctcgctttgttgcccaggctggagtgcagtggtgcaatctcagctcacagcaacctccgcctcccaggttcaagtgattcccctgcctcagcctcccaagtagctgggattacaggcacgcatcaccacgcctggctaattttttgtgttttagtagagacagggtttcaccatgttggccaagacagtctcgatctcctgacctcgtgatctgcccacctcggcctcccgaagtcctgggattacagagctgagccactgcgcctggcctttgatagatatttcaagttcatcttttttttttgcttccttaatttttttttttgctataccccatgcctccaagataacagttttttctttttaatttaaatataatacagttttactgtgtatccaagaatatctgaaatctttcgtgggtctctttcttttgtcttttgtatctgttgctttttgctgggctgagcctgcttaaaacaagccccgttagctgtaaaggtttaccttagaaagtcaggtgtcttcctctgtaactctctcccttttccatctgctccaaggcatttatttatattaatcttgacgcaaagggaagttgtgtccacttcaccttggccagtaaggaagcagtgtttggcagatgttgttactcctaataatgccagccagtgagtgaagctgacctgaatgcctcccagggctgaggcaatggcatgatcaccgaagctcaaaccagagacagtttcacctttctgactgaatagtgttcggtgtaggccaaatgcctgcagactactgtttgaggactggtgtggtctaccaggtgtttccttagcgcctggatgtctctggctgccatcccagggatagagcatggtgttagatacgctagatgcctgccgaagtaattatgggtgaaacatatgatgtccaagatttgcttttaaaggctccaatacctcctcccagattccggagggctgtgaaacaattagctatgaaaactggtaattcctgaagctgggtacatgggggttcatgatccctctctcaccttttttgggggagaatgtttgagactttaataagaacttgttgccttttccttttacagggtgttgcaggcatcttcctcaggcctgttttctctgttttccaggctgacgtgatggcagacagggttccccgctgcccggtctgcaccggcgttgtgaagcccgacattgtgttct

SEQ ID NO: 13991 - DNA, 785 bp, Homo sapiens
acatggcgttctggggttggcgcgccgcggcagccctccggctgtggggccgggtagttgaacgggtcgaggccgggggaggcgtggggccgtttcaggcctgcggctgtcggctggtgcttggcggcagggacgatgtgagtgcggggctgagaggcagccatggggcccgcggtgagcccttggacccggcgcgccccttgcagaggcctcccagacccgaggtgcccagggcattccggaggcagccgagggcagcagctcccagtttcttcttttcgaggatgtagctgagctgattcgggccagagcctgccagagggtggtggtcatggtgggggccggcatcagcacacccagtggcattccagacttcagatcgccggggagtggcctgtacagcaacctccagcagtacgatctcccgtaccccgaggccatttttgaactcccattcttctttcacaaccccaagccctttttcactttggccaaggagctgtaccctggaaactacaagcccaacgtcactcactactttctccggctgcttcatgacaaggggctgcttctgcggctctacacgcagaacatcgatgggcttgagagagtgtcgggcatccctgcctcaaagctggttgaagctcatggaacctttgcctctgccacctgcacagtctgccaaagacccttcccaggggaggacattcgggctgacgtgatggcagacagggttccccgctgcccggtctgcaccggcgttgtgaagcccgacattgtgttct

SEQ ID NO: 13992 - DNA, 3877 bp, Homo sapiens
ggcgtttgcagcccacttcccgcgcacttggctgtgccattgaggcgtcaaagagtgtgggcgcctgtggtcgaacccgctacggactagctttgtggtgtcagcctttgtgacccggaattgctcctgtcaaatgaggatcttcccagtagtgttttgcgaggattaggtgtaaatataatgcctgaccatagtaaaagcgctcagaaagtattaactatcaccgccatccgggttgaaaaaggtgtgagcgcagggtacagaaatgctggctccaggtttgacctccggggcgagagatgagacaccagactagggaacttcctctactcgcctctacgtctacctgggcgcgccggaggcgtcggcaaggaggcgggggcggggcgcggaggcgggaccggggcgccgggggcgggggcggtaggcggaggcggggctggggcgccgggggcgggggtgggaggcggaggcggggccggggcgccgggggcggggcgagtccggaggactccttggactgcgcggaacatggcgttctggggttggcgcgccgcggcagccctccggctgtggggccgggtagttgaacgggtcgaggccgggggaggcgtggggccgtttcaggcctgcggctgtcggctggtgcttggcggcagggacgatgtgagtgcggggctgagaggcagccatggggcccgcggtgagcccttggacccggcgcgccccttgcagaggcctcccagacccgaggtgcccagggcattccggaggcagccgagggcagcagctcccagtttcttcttttcgaggtattttgggcaaggacaagcacttcttgcgtgttcgttgtcgacacctcgcccactctttctcaccttgccgtgtttcctttgcggcatgtctgggagtttacgtgcgttccaacaccggggcctccgtctttatgctgatctgtggacgtcacttatgggggttttgtcgtttatttcaccattccctcattgaaatacgttctaacctttagttattgtgcatcatgctgtggtgaataaccttgttggcacctcactgtttgcataaattcctagtactgggattgctaggtccaaaagtatatgcatttaacgctttaatgatccctcataaatgttgtgcggttaatactcccactggcatgtgatcgtacccgtctccatagtaattgcatctaagaactgaggctacataggaaaaaatcttaaggtccatggttgttaggtatcagatgccctataatggatgaatatttaagtaaataatggcacattgacttgctgtctgacacaactgctgaaaatgttggtgaaaagtgagtctcgaagtggtagctcacacttgtaataccagcactttcggaggctgagacggggatcgctcgaggccaggagttcaagagcagcctgggcaacataacgagacccccatctctaccaaaaatttaaaaattagccgggcatggtggcgcaagcctgttgtcccagttactcctgagactaaggcaagaggatcccttgagtccaggagttcaaggctgcagtgagctatgattgagccactgcactccagcctgggtgacagagcaagactcttatctacctgtgggaaaaaaaaaagaaaaaagtttaatagatcctgaagagttggccgggcgcggtagctcacgcctgtaatcccagcactttgggaggatgagacgggtggataacgaggtcaggagttcgagaccagctgggccaacatggtgaaaccccatttctactgaaattacaaaaattagccgggcgtggtggcgggcgcctgtaatcctagctactcaggaggcggaggcaggagaatcacttgaacccggaaggcagaggttgcagtgagccgagatggcaccattgcactccagcccgggcgaaagagcaaaaactccgtctcaaaaaaaaacaaagatcccgaagagtcagtcgttcatccaagaagccctgactgagctcttattctgtgccagactctgttctaggtgctatggatggagcagggaccaggacctacaaacacgtggagcgcattctaatatctgtgatactctgcaaaactgttaaaacaaatccttgcggccgggcgcggtggctcacgcctgtaattccagcactttggaaggccgagacgggcggatcacgaggtcaggagatcgagaccatcctggctaacacagtgaaaccccgtctttactaaaaatacaaggaaattagccaggcgtggtggcgggtgcctgtagtcccagctactcgggaggctgaggcaggagaatggcgtgaacctgggaggcggagcttgcagtgagccgagatcgcgacactgcactccagcctgggcaacagagcgagactccgtctcaaaacaaaacaaaacaaaacaaaacaaaaatccttgctaccactggccctaaagcaggaggcatagggctgcgtgtgaggagtagtccattgcatgggcttcctccagtttggctttggatttttgagctctctgaatttgttgtttgtgtcctttgcacagtgtccctcccaggttgcacccatgcctgcccctcagggtcccccactcccagtgaatttcacaccatgcagcatgtactttaagccatacatcttacgtatgttccagacatttggtaaaacgccgtttatgtgtttttcagtgactcacaaacattttatttacgtaaatgaggaatgtactcaggcacccttcgtgataccttgccctcagcaggcactcaacagcaataataactttcattccttttgtgcttctcttaacagttcgtgtttagtaggagcacagtagctgtttggggaacgaccttaagtgaatagatgtctgaaatgctgtgtgaagtggggcgcttaataggtggtgagatggttttagaaccagggttttccctctttgcttcttgactccttaaccagttttcattaggagacccctttggaggtttgcagtcagtcagagttgagtgcctactgagtgtactgaattatgaaatgagcacagttcccattaacctgaattttttgctcccaagtaagtcttgatttctgatttatgactgctttttgttgtaccccaatagtcgtctaagaaaggtgattattttgagaggcctggggagacacacatgctcattctcgagggtggcggtggtgcagagggcagagccatgctcgttcttgctatcctgagattggttgctatctgtttcctttgctgctgtgtttttttctgtcagtattaaaggtggaagaaggtccatatctttttctgtgggtgcttcaagtgttgttggaagtggaggcagcagtgacaaggggaagctttccctgcaggatgtagctgagctgattcgggccagagcctgccagagggtggtggtcatggtgggggccggcatcagcacacccagtggcattccagacttcaggtactgcccacagtcccacctgccttctgcgctcccctcccctgactcctgccctccccactgcccagtttattccacttccctgtcctcttccaaaggcctcagagcctttcttctctccctgcagatcgccggggagtggcctgtacagcaacctccagcagtacgatctcccgtaccccgaggccatttttgaactcccattcttctttcacaaccccaagccctttttcactttggccaaggagctgtaccctggaaactacaagcccaacgtcactcactactttctccggctgcttcatgacaaggggctgcttctgcggctctacacgcagaacatcgatgggcttgagagag

SEQ ID NO: 13993 - DNA, 763 bp, Homo sapiens
ggcgtttgcagcccacttcccgcgcacttggctgtgccattgaggcgtcaaagagtgtgggcgcctgtggtcgaacccgctacggactagctttgtggtgtcagcctttgtgacccggaattgctcctgtcaaatgaggatcttcccagtagtgttttgcgaggattaggtgtaaatataatgcctgaccatagtaaaagcgctcagaaagtattaactatcaccgccatccgggttgaaaaagttcgtgtttagtaggagcacagtagctgtttggggaacgaccttaagtgaatagatgtctgaaatgctgtgtgaagtggggcgcttaataggtgtattaaaggtggaagaaggtccatatctttttctgtgggtgcttcaagtgttgttggaagtggaggcagcagtgacaaggggaagctttccctgcaggatgtagctgagctgattcgggccagagcctgccagagggtggtggtcatggtgggggccggcatcagcacacccagtggcattccagacttcagatcgccggggagtggcctgtacagcaacctccagcagtacgatctcccgtaccccgaggccatttttgaactcccattcttctttcacaaccccaagccctttttcactttggccaaggagctgtaccctggaaactacaagcccaacgtcactcactactttctccggctgcttcatgacaaggggctgcttctgcggctctacacgcagaacatcgatgggcttgagagag

SEQ ID NO: 13994 - DNA, 11259 bp, Homo sapiens
gtagcaggccgggggcgggccccgctggttgctcggttacagcgcgtctctgcgctccggacaaaactctccggcgtttgcagcccacttcccgcgcacttggctgtgccattgaggcgtcaaagagtgtgggcgcctgtggtcgaacccgctacggactagctttgtggtgtcagcctttgtgacccggaattgctcctgtcaaatgaggatcttcccagtagtgttttgcgaggattaggtgtaaatataatgcctgaccatagtaaaagcgctcagaaagtattaactatcaccgccatccgggttgaaaaaggtgtgagcgcagggtacagaaatgctggctccaggtttgacctccggggcgagagatgagacaccagactagggaacttcctctactcgcctctacgtctacctgggcgcgccggaggcgtcggcaaggaggcgggggcggggcgcggaggcgggaccggggcgccgggggcgggggcggtaggcggaggcggggctggggcgccgggggcgggggtgggaggcggaggcggggccggggcgccgggggcggggcgagtccggaggactccttggactgcgcggaacatggcgttctggggttggcgcgccgcggcagccctccggctgtggggccgggtagttgaacgggtcgaggccgggggaggcgtggggccgtttcaggcctgcggctgtcggctggtgcttggcggcagggacgatgtgagtgcggggctgagaggcagccatggggcccgcggtgagcccttggacccggcgcgccccttgcagaggcctcccagacccgaggtgcccagggcattccggaggcagccgagggcagcagctcccagtttcttcttttcgaggtattttgggcaaggacaagcacttcttgcgtgttcgttgtcgacacctcgcccactctttctcaccttgccgtgtttcctttgcggcatgtctgggagtttacgtgcgttccaacaccggggcctccgtctttatgctgatctgtggacgtcacttatgggggttttgtcgtttatttcaccattccctcattgaaatacgttctaacctttagttattgtgcatcatgctgtggtgaataaccttgttggcacctcactgtttgcataaattcctagtactgggattgctaggtccaaaagtatatgcatttaacgctttaatgatccctcataaatgttgtgcggttaatactcccactggcatgtgatcgtacccgtctccatagtaattgcatctaagaactgaggctacataggaaaaaatcttaaggtccatggttgttaggtatcagatgccctataatggatgaatatttaagtaaataatggcacattgacttgctgtctgacacaactgctgaaaatgttggtgaaaagtgagtctcgaagtggtagctcacacttgtaataccagcactttcggaggctgagacggggatcgctcgaggccaggagttcaagagcagcctgggcaacataacgagacccccatctctaccaaaaatttaaaaattagccgggcatggtggcgcaagcctgttgtcccagttactcctgagactaaggcaagaggatcccttgagtccaggagttcaaggctgcagtgagctatgattgagccactgcactccagcctgggtgacagagcaagactcttatctacctgtgggaaaaaaaaaagaaaaaagtttaatagatcctgaagagttggccgggcgcggtagctcacgcctgtaatcccagcactttgggaggatgagacgggtggataacgaggtcaggagttcgagaccagctgggccaacatggtgaaaccccatttctactgaaattacaaaaattagccgggcgtggtggcgggcgcctgtaatcctagctactcaggaggcggaggcaggagaatcacttgaacccggaaggcagaggttgcagtgagccgagatggcaccattgcactccagcccgggcgaaagagcaaaaactccgtctcaaaaaaaaacaaagatcccgaagagtcagtcgttcatccaagaagccctgactgagctcttattctgtgccagactctgttctaggtgctatggatggagcagggaccaggacctacaaacacgtggagcgcattctaatatctgtgatactctgcaaaactgttaaaacaaatccttgcggccgggcgcggtggctcacgcctgtaattccagcactttggaaggccgagacgggcggatcacgaggtcaggagatcgagaccatcctggctaacacagtgaaaccccgtctttactaaaaatacaaggaaattagccaggcgtggtggcgggtgcctgtagtcccagctactcgggaggctgaggcaggagaatggcgtgaacctgggaggcggagcttgcagtgagccgagatcgcgacactgcactccagcctgggcaacagagcgagactccgtctcaaaacaaaacaaaacaaaacaaaacaaaaatccttgctaccactggccctaaagcaggaggcatagggctgcgtgtgaggagtagtccattgcatgggcttcctccagtttggctttggatttttgagctctctgaatttgttgtttgtgtcctttgcacagtgtccctcccaggttgcacccatgcctgcccctcagggtcccccactcccagtgaatttcacaccatgcagcatgtactttaagccatacatcttacgtatgttccagacatttggtaaaacgccgtttatgtgtttttcagtgactcacaaacattttatttacgtaaatgaggaatgtactcaggcacccttcgtgataccttgccctcagcaggcactcaacagcaataataactttcattccttttgtgcttctcttaacagttcgtgtttagtaggagcacagtagctgtttggggaacgaccttaagtgaatagatgtctgaaatgctgtgtgaagtggggcgcttaataggtggtgagatggttttagaaccagggttttccctctttgcttcttgactccttaaccagttttcattaggagacccctttggaggtttgcagtcagtcagagttgagtgcctactgagtgtactgaattatgaaatgagcacagttcccattaacctgaattttttgctcccaagtaagtcttgatttctgatttatgactgctttttgttgtaccccaatagtcgtctaagaaaggtgattattttgagaggcctggggagacacacatgctcattctcgagggtggcggtggtgcagagggcagagccatgctcgttcttgctatcctgagattggttgctatctgtttcctttgctgctgtgtttttttctgtcagtattaaaggtggaagaaggtccatatctttttctgtgggtgcttcaagtgttgttggaagtggaggcagcagtgacaaggggaagctttccctgcaggatgtagctgagctgattcgggccagagcctgccagagggtggtggtcatggtgggggccggcatcagcacacccagtggcattccagacttcaggtactgcccacagtcccacctgccttctgcgctcccctcccctgactcctgccctccccactgcccagtttattccacttccctgtcctcttccaaaggcctcagagcctttcttctctccctgcagatcgccggggagtggcctgtacagcaacctccagcagtacgatctcccgtaccccgaggccatttttgaactcccattcttctttcacaaccccaagccctttttcactttggccaaggagctgtaccctggaaactacaagcccaacgtcactcactactttctccggctgcttcatgacaaggggctgcttctgcggctctacacgcagaacatcgatgggcttgagagaggtgagccctctgtgagtcgcacacattctttttctcccacggaggctcgggtgcctgtttctcccagggaggctcgggtgcctgtttctcacaggggatgctcgggtgcctgtttctggggacggccaaaacctatcgcttatgcttcttccttgggactttttttgagccaactagttagggctttgttcccaaggaaaatgtcctctgggtgtttaaaggccactgcttgttctcctgcatacctgcagagctgtgtattttgggcagaagttgacattgttttgccaatctggtgtgatgatctctttttttcttctctcttttaagaagtgtattatggaatttttttgagcacacacaaagagagcaatgtaacgaaccgtcctgtcctcatcaccagcacacagccagttcttcctgcgtcctcaccaccttcttccaaatccccagattattttgaagcaaatctctcacatcatgaatttaatctagaaataatctataaacacatgaatggatagctctagagaatactttaaaaacaactccggccgggtgccggattacaggtgtgggatcacacctgtaatcccagcattttgggaggccgaggcaggtagatcacctgaggtcgggagttcgagaccagcctggccaacgtggcaaaaccccgtctctactaaaaatacaaaaaattagccaggcgtggtggtgtgtgcctgtaatcccaggtactcgggaggctgagacaggagaatctcttgaacccagcaggcggaggttgcagtgagccgagatcgtgccacttcactccagcctgggcgacagagggagattctgtctcaaaaaaataaataaaaataaaaataattaaaaaataaaaacaactctgatagtgattcacactgaagaatcactagtaattccttaatatggtcacacttagtctgtggtgatttcttgaccgtatccatatggtgcccaaaccagcgattcacaggttgtgccaacttctggccgtgcacctaacggaagcacttggtggggccttttccttacgtgcagtgatgcagacaggtgctgggacagtcagctctccgggagccaggctcccggagagactgctgatgtgttgtcagttaaaaagaggtggcaccttggctccaggaatgtgtttccttgccagaaggatcccctgacttggaaccacagaggcagcagcggatgccccatgttggtgggctcttctcccagaggtgcagcagggcaggccttgtgggaaggtgggagctcctggctgtgagattcagcactgctgagttagggcagcgacagggacttgggaagcctcctgcagctgggaccctggctgtgccaccgcagcctttcagaaccagttaatactaacacaactttcataagaagtcactttttgtctgtttctaccaagcaattcttttggaatttatgatatttatatcctcattttaacttggtatctgtagaatagaagatatgttcctggatattagatataaatttttgagacagggtcttggctctgttgcccaggctagagtgcagtggcatgatcatagctcactatagcctgaactcttgggccgaagtgatccttttgcctcagcctctggaatagctgggactacgggcatgcactaccatgcctggctaattaaaaaaattttttaagacaagtctcactatgttgctgaggctggtctcaaactcctggcctcaagtgatcctcctgccttggccttccaaagcactgggattacaggcatgagccactgcacccagcctggtattaggtgtaatttttttttttttttttgagacagaatctcgctctcttacccaaactggagtgcggtggcacgacctcagctcactgcaacttccacctcccgggttcaagcgattctcctgtctcagcctccccgagtagctggcactacaggtgcctgccaccacatctggctaatttttgtatttttagtagaggtacggtttcaccatgatggccaggccggtcttgaactcctagcctcaaatgatctgcccacctcggcctcccaaagtgctgggattacaggtgtgggccactgtgcccggctggatataattttatttgagcttttatcaaatggtttttcgtactgagttttgacaggctttgttttaaccgtgatttggctccagctaggtgcccctttgctcccctgccttattctggttgatggcgcatgtaggtgatacgggcatgaaaaccaggcttgaggacatcacaaccccaaggggctgtgcctccttccaggagtcctgccaagcccagaagttgtgctcttggccttgcgtgctcatctcggaggcggcagcaacacttcgctttggcttgaatttcagtgtcgggcatccctgcctcaaagctggttgaagctcatggaacctttgcctctgccacctgcacagtctgccaaagacccttcccaggggaggacattcgggtgagttatcctgctgttggttgtccttctgcagtttgctgttggggtgatctggaaaagtggtattttataagcattgtctcgaaaggacagttgaacaataatagtgtgaaacattttatttgtaaattagaaaatcaatacatgcttgtaaaaaaatttaagacaatatagaaatatgtagggaaaatgaatctcccttcagccaattccagctgcccactttttttttttttttttgagattgagtctcactctgtcgcccaggctggagtgcagtgggcgatctcggctcactgcaacctccgtctcccggattcaaggaattcttctgcctcagcctcctaagtagctgggattacaggcgtgagccaccacgcccggcaatcagatggccttttgtgccgagcttatttcctgaaaatgtttctcgctccttcgccttgtagcttgtgttagtatttcatcctgtttcatggctaaatgttccactgatgtatgcaccacagttggtttgtttgtacatggatgggtgtttgggttgtcccacctttctgctcttgtgtatagttctgctgtggagcatatgcaagtattcgtttgagagtccttgttttttattcttttgagtatgatacctacaagtattgctgggtaactccacgtttagctatatttatttatttattttttgagacacagtcttacactgtcacccaggctggagtgcaatggcgcgatttcggctcaatacaacctctgcctcccgggttcaagcgattctcctgcctcagcctcctgagaagctgggattacaggtgcctgccaccatgcccagctaatgttttttgtatttctagtagagatggggtttcaccatgttggccaggctgctcttgcattcctgacctcaggtggttcacccgcctcggcctcccaaagtgctaagattacaggcgtgagccaccatgccctgcccatgtttaacttttttgtttgtttgttttgagacggagtctagctcttatcaccaggctggagtgcagtggcgcaatctcggctcactgtaccatccgcctcctgggttcaagcgattctcctgcctcagcttcctgagtagctgggactacaggcacacaccaccacgcccggctaatttttgtatttagtagagtagtttcaccatgttggccaggatgtctcgatctcttgacctcgtgatccgcctgcctctttctcccaaagtgtgggattacaggcgagagccactgcgcccggcccgttttaactttttgaggaacgaatatactgttatctgcagaagctggaccattttacattccaccaacagtgggcaagggtttcatcttttccacatcccaacacttactttccattttttaattacagctatcccagtgggtgggaggtggtaacccactgtagcactgattggcattttcctaatgattcatgatatcaaacatctttccatgtgctttttggccatttgtatatctttggagattgaagtcctttgcgcattgtttaattgtgttgtcttttttattgttaagagagtcctttatatattctggaagctagatccttatcagagacatgatttgcaaatattttctgtcattctgtaggttgtcttttttactttgttgatgtcttttgatgcatagaagttttgattttgatgaaatctagtttgtctatttattttctcactcttttggaatcatatctgagaaatggtattgttttactcctgttttcttataagagttttatagtttaaagcttttacatttagttctttgatccattttgagttaatttttgtgtgcgctgtaaggtagggatccagcttcattttcttttatgtggatatgtaattgttccagcaccatttgtttaaaaaaactgtggtcttggcattgttgttgaaaatcagttggccataggtgtatgggttatttctagagtctcaattctattccattgttatctgtatatccttgtgcctgcactataatgttttggttactgtagctttgtagtaagttttgaaattaggaagtgtgagtccagcacatagtagaaacttgatatatacgtattattgttttggtcaactcattcattgaatgaccaatttattcaacaaatagtttagtctcctcagtgccaggccctttgctgggttctgtggatgtgaatagaaattaaaataaggtggagtcatccaacagttacaactgggtgccatacgaattttactataaatatgtactggacactacactgactcagctgtaggaacagagtaggctgggaagcacctttgagatgaggccgtctggatgtaagagtctgtttctggcagcagagacctggagtgtgggaggcctgcttgctctgttagggtttgaactgtatcctgacgatcatgggaggcattggaggatttttaggcaggaaaatgatgtgaagggatttgcatttaaaagagattatttgggactgggcacagtggctcacgcctgtaattccagcactttgggaggcctagacaggcgggtcacctgaggtgggaagcttgagagcagcctgccaaaatggtgaaatcccatctctactaaaaatacaaaaattagccaggtgtggtggtgcacctgtaatcccagctactcaggaggctgaggcagaagaattgcttgaacctgggaggggaggttgctgtgagctgagatcgcaccactgcactccagcctgggtgacagagtgagactccatctcaaaacaaaataaataaataaataagagaataaaatagataatttgggcaacaggttgatgttaattccccacctttgttcttctccttcagtactgtgttggctggtctgaatcttttggcttttcatataaatttctgaaactgttgctatctgttctctgcctgttttatttttgttgttgttgtttggattttttgtttttttgagatagagtcttgctctgttgcccaggctggagtgcagtggtatgatctcagctcattgcaacctccccctctcaggttcaagcgattctcttgcctcatcctcctgagtagctgggattgcaggcatgcgccaccatgcccagctaatttttgtatttttagtagagatggggtttcactatgttggtgaggctggtgtcgaactcctgacctcatgatccacccgcctcggcctcccaaagtgctgggatgacaggcatgagccaccgtgtctggcctctctgcctgttttttaagacttttgtctttggagttttgcggtttctccactgtggttttccatatgaattttcttttatttcttctgcttaaaatttgtaggccagttggtcatggtggctcacgcccgtaatcccagtactttgggaggccgggtgggtggatcgcctgaggtcaggagtttgagaccagcctgaccaacatggagaaaccccatatctactaaaaatacaaaattagccgggcgtgatggtgcatgcctataatctcagatactcgggaggctgaggcaggcgaattgcttgaaccagggaggcggaggttgcggtgagctgagattaggccattgcactccagcctgggaaacaagagcgaaactccatctcaaaaaaaaaaaaataataataataattgtaggccttccttaagaaaaataaaataaaattctaggctgggcgcggtggctcctgcctgtaatcccagtactttgggaagctgaggcgggtggatcacctgagttaggagtttgagaccagcctggccaacatggtgaaaccccgtctctactaaaaatacaaagatgagccatttgtggtggcacccatctgtaatcccagctactcgggaggctgaggcaggagaattgctggaacccaggaggcagaagttgtagtgaaccgagatcatgccactgcactccagcctgggtgacagagcgagatgccatctcaaaaaaataaaatataaaataaaattctaagccctgcaaccaactgaatggagccctccccttggtcaagggaaccccagagaaaccttggaagcttgagttcctggccgtagcaggagaggaggtcagacgcgcctcactgtacccctccctccccagccaccattaggcttcttcactaagggctaaacagaaaccagcccttttcaaagactctacactgctaatgtggattactggtttatcttcccagatacagattaaagacaagatgagattaatggttccttcacccttccctgagaggtctgcttagttctcttcctctgtttccttctatcttaggtaaaatgtacatttactgggcacttactgaagtctcacaagtacgtaaccactcacctcacagccaccctccctctttgaaggaccacatgtaattactaaacctcctgagaacctcttgggacagaaacaagcacagatgtgccgtgactcatgtttttcctgtgggcaccctcaggctggctcagtagccctcacttgcttgagatcctgaatctgcgggttggcgtctttcatggttgctggatcatactctgccgttatctcttcggatatgagttgcccctagcccactatctggcccctctctttagggacctctgattgaacatacattagaccttctctctcctgctgttcctgatcactcttctgtcctgtaattgctgcttcttgtgctgcattctgg

SEQ ID NO: 13995 - DNA, 1251 bp, Homo sapiens
gtagcaggccgggggcgggccccgctggttgctcggttacagcgcgtctctgcgctccggacaaaactctccggcgtttgcagcccacttcccgcgcacttggctgtgccattgaggcgtcaaagagtgtgggcgcctgtggtcgaacccgctacggactagctttgtggtgtcagcctttgtgacccggaattgctcctgtcaaatgaggatcttcccagtagtgttttgcgaggattaggtgtaaatataatgcctgaccatagtaaaagcgctcagaaagtattaactatcaccgccatccgggttgaaaaagtattaaaggtggaagaaggtccatatctttttctgtgggtgcttcaagtgttgttggaagtggaggcagcagtgacaaggggaagctttccctgcaggatgtagctgagctgattcgggccagagcctgccagagggtggtggtcatggtgggggccggcatcagcacacccagtggcattccagacttcagatcgccggggagtggcctgtacagcaacctccagcagtacgatctcccgtaccccgaggccatttttgaactcccattcttctttcacaaccccaagccctttttcactttggccaaggagctgtaccctggaaactacaagcccaacgtcactcactactttctccggctgcttcatgacaaggggctgcttctgcggctctacacgcagaacatcgatgggcttgagagagtgtcgggcatccctgcctcaaagctggttgaagctcatggaacctttgcctctgccacctgcacagtctgccaaagacccttcccaggggaggacattcgggtaaaatgtacatttactgggcacttactgaagtctcacaagtacgtaaccactcacctcacagccaccctccctctttgaaggaccacatgtaattactaaacctcctgagaacctcttgggacagaaacaagcacagatgtgccgtgactcatgtttttcctgtgggcaccctcaggctggctcagtagccctcacttgcttgagatcctgaatctgcgggttggcgtctttcatggttgctggatcatactctgccgttatctcttcggatatgagttgcccctagcccactatctggcccctctctttagggacctctgattgaacatacattagaccttctctctcctgctgttcctgatcactcttctgtcctgtaattgctgcttcttgtgctgcattctgg

SEQ ID NO: 13996 - DNA, 12118 bp, Homo sapiens
ctgcgcggaacatggcgttctggggttggcgcgccgcggcagccctccggctgtggggccgggtagttgaacgggtcgaggccgggggaggcgtggggccgtttcaggcctgcggctgtcggctggtgcttggcggcagggacgatgtgagtgcggggctgagaggcagccatggggcccgcggtgagcccttggacccggcgcgccccttgcagaggcctcccagacccgaggtgcccagggcattccggaggcagccgagggcagcagctcccagtttcttcttttcgaggtattttgggcaaggacaagcacttcttgcgtgttcgttgtcgacacctcgcccactctttctcaccttgccgtgtttcctttgcggcatgtctgggagtttacgtgcgttccaacaccggggcctccgtctttatgctgatctgtggacgtcacttatgggggttttgtcgtttatttcaccattccctcattgaaatacgttctaacctttagttattgtgcatcatgctgtggtgaataaccttgttggcacctcactgtttgcataaattcctagtactgggattgctaggtccaaaagtatatgcatttaacgctttaatgatccctcataaatgttgtgcggttaatactcccactggcatgtgatcgtacccgtctccatagtaattgcatctaagaactgaggctacataggaaaaaatcttaaggtccatggttgttaggtatcagatgccctataatggatgaatatttaagtaaataatggcacattgacttgctgtctgacacaactgctgaaaatgttggtgaaaagtgagtctcgaagtggtagctcacacttgtaataccagcactttcggaggctgagacggggatcgctcgaggccaggagttcaagagcagcctgggcaacataacgagacccccatctctaccaaaaatttaaaaattagccgggcatggtggcgcaagcctgttgtcccagttactcctgagactaaggcaagaggatcccttgagtccaggagttcaaggctgcagtgagctatgattgagccactgcactccagcctgggtgacagagcaagactcttatctacctgtgggaaaaaaaaaagaaaaaagtttaatagatcctgaagagttggccgggcgcggtagctcacgcctgtaatcccagcactttgggaggatgagacgggtggataacgaggtcaggagttcgagaccagctgggccaacatggtgaaaccccatttctactgaaattacaaaaattagccgggcgtggtggcgggcgcctgtaatcctagctactcaggaggcggaggcaggagaatcacttgaacccggaaggcagaggttgcagtgagccgagatggcaccattgcactccagcccgggcgaaagagcaaaaactccgtctcaaaaaaaaacaaagatcccgaagagtcagtcgttcatccaagaagccctgactgagctcttattctgtgccagactctgttctaggtgctatggatggagcagggaccaggacctacaaacacgtggagcgcattctaatatctgtgatactctgcaaaactgttaaaacaaatccttgcggccgggcgcggtggctcacgcctgtaattccagcactttggaaggccgagacgggcggatcacgaggtcaggagatcgagaccatcctggctaacacagtgaaaccccgtctttactaaaaatacaaggaaattagccaggcgtggtggcgggtgcctgtagtcccagctactcgggaggctgaggcaggagaatggcgtgaacctgggaggcggagcttgcagtgagccgagatcgcgacactgcactccagcctgggcaacagagcgagactccgtctcaaaacaaaacaaaacaaaacaaaacaaaaatccttgctaccactggccctaaagcaggaggcatagggctgcgtgtgaggagtagtccattgcatgggcttcctccagtttggctttggatttttgagctctctgaatttgttgtttgtgtcctttgcacagtgtccctcccaggttgcacccatgcctgcccctcagggtcccccactcccagtgaatttcacaccatgcagcatgtactttaagccatacatcttacgtatgttccagacatttggtaaaacgccgtttatgtgtttttcagtgactcacaaacattttatttacgtaaatgaggaatgtactcaggcacccttcgtgataccttgccctcagcaggcactcaacagcaataataactttcattccttttgtgcttctcttaacagttcgtgtttagtaggagcacagtagctgtttggggaacgaccttaagtgaatagatgtctgaaatgctgtgtgaagtggggcgcttaataggtggtgagatggttttagaaccagggttttccctctttgcttcttgactccttaaccagttttcattaggagacccctttggaggtttgcagtcagtcagagttgagtgcctactgagtgtactgaattatgaaatgagcacagttcccattaacctgaattttttgctcccaagtaagtcttgatttctgatttatgactgctttttgttgtaccccaatagtcgtctaagaaaggtgattattttgagaggcctggggagacacacatgctcattctcgagggtggcggtggtgcagagggcagagccatgctcgttcttgctatcctgagattggttgctatctgtttcctttgctgctgtgtttttttctgtcagtattaaaggtggaagaaggtccatatctttttctgtgggtgcttcaagtgttgttggaagtggaggcagcagtgacaaggggaagctttccctgcaggatgtagctgagctgattcgggccagagcctgccagagggtggtggtcatggtgggggccggcatcagcacacccagtggcattccagacttcaggtactgcccacagtcccacctgccttctgcgctcccctcccctgactcctgccctccccactgcccagtttattccacttccctgtcctcttccaaaggcctcagagcctttcttctctccctgcagatcgccggggagtggcctgtacagcaacctccagcagtacgatctcccgtaccccgaggccatttttgaactcccattcttctttcacaaccccaagccctttttcactttggccaaggagctgtaccctggaaactacaagcccaacgtcactcactactttctccggctgcttcatgacaaggggctgcttctgcggctctacacgcagaacatcgatgggcttgagagaggtgagccctctgtgagtcgcacacattctttttctcccacggaggctcgggtgcctgtttctcccagggaggctcgggtgcctgtttctcacaggggatgctcgggtgcctgtttctggggacggccaaaacctatcgcttatgcttcttccttgggactttttttgagccaactagttagggctttgttcccaaggaaaatgtcctctgggtgtttaaaggccactgcttgttctcctgcatacctgcagagctgtgtattttgggcagaagttgacattgttttgccaatctggtgtgatgatctctttttttcttctctcttttaagaagtgtattatggaatttttttgagcacacacaaagagagcaatgtaacgaaccgtcctgtcctcatcaccagcacacagccagttcttcctgcgtcctcaccaccttcttccaaatccccagattattttgaagcaaatctctcacatcatgaatttaatctagaaataatctataaacacatgaatggatagctctagagaatactttaaaaacaactccggccgggtgccggattacaggtgtgggatcacacctgtaatcccagcattttgggaggccgaggcaggtagatcacctgaggtcgggagttcgagaccagcctggccaacgtggcaaaaccccgtctctactaaaaatacaaaaaattagccaggcgtggtggtgtgtgcctgtaatcccaggtactcgggaggctgagacaggagaatctcttgaacccagcaggcggaggttgcagtgagccgagatcgtgccacttcactccagcctgggcgacagagggagattctgtctcaaaaaaataaataaaaataaaaataattaaaaaataaaaacaactctgatagtgattcacactgaagaatcactagtaattccttaatatggtcacacttagtctgtggtgatttcttgaccgtatccatatggtgcccaaaccagcgattcacaggttgtgccaacttctggccgtgcacctaacggaagcacttggtggggccttttccttacgtgcagtgatgcagacaggtgctgggacagtcagctctccgggagccaggctcccggagagactgctgatgtgttgtcagttaaaaagaggtggcaccttggctccaggaatgtgtttccttgccagaaggatcccctgacttggaaccacagaggcagcagcggatgccccatgttggtgggctcttctcccagaggtgcagcagggcaggccttgtgggaaggtgggagctcctggctgtgagattcagcactgctgagttagggcagcgacagggacttgggaagcctcctgcagctgggaccctggctgtgccaccgcagcctttcagaaccagttaatactaacacaactttcataagaagtcactttttgtctgtttctaccaagcaattcttttggaatttatgatatttatatcctcattttaacttggtatctgtagaatagaagatatgttcctggatattagatataaatttttgagacagggtcttggctctgttgcccaggctagagtgcagtggcatgatcatagctcactatagcctgaactcttgggccgaagtgatccttttgcctcagcctctggaatagctgggactacgggcatgcactaccatgcctggctaattaaaaaaattttttaagacaagtctcactatgttgctgaggctggtctcaaactcctggcctcaagtgatcctcctgccttggccttccaaagcactgggattacaggcatgagccactgcacccagcctggtattaggtgtaatttttttttttttttttgagacagaatctcgctctcttacccaaactggagtgcggtggcacgacctcagctcactgcaacttccacctcccgggttcaagcgattctcctgtctcagcctccccgagtagctggcactacaggtgcctgccaccacatctggctaatttttgtatttttagtagaggtacggtttcaccatgatggccaggccggtcttgaactcctagcctcaaatgatctgcccacctcggcctcccaaagtgctgggattacaggtgtgggccactgtgcccggctggatataattttatttgagcttttatcaaatggtttttcgtactgagttttgacaggctttgttttaaccgtgatttggctccagctaggtgcccctttgctcccctgccttattctggttgatggcgcatgtaggtgatacgggcatgaaaaccaggcttgaggacatcacaaccccaaggggctgtgcctccttccaggagtcctgccaagcccagaagttgtgctcttggccttgcgtgctcatctcggaggcggcagcaacacttcgctttggcttgaatttcagtgtcgggcatccctgcctcaaagctggttgaagctcatggaacctttgcctctgccacctgcacagtctgccaaagacccttcccaggggaggacattcgggtgagttatcctgctgttggttgtccttctgcagtttgctgttggggtgatctggaaaagtggtattttataagcattgtctcgaaaggacagttgaacaataatagtgtgaaacattttatttgtaaattagaaaatcaatacatgcttgtaaaaaaatttaagacaatatagaaatatgtagggaaaatgaatctcccttcagccaattccagctgcccactttttttttttttttttgagattgagtctcactctgtcgcccaggctggagtgcagtgggcgatctcggctcactgcaacctccgtctcccggattcaaggaattcttctgcctcagcctcctaagtagctgggattacaggcgtgagccaccacgcccggcaatcagatggccttttgtgccgagcttatttcctgaaaatgtttctcgctccttcgccttgtagcttgtgttagtatttcatcctgtttcatggctaaatgttccactgatgtatgcaccacagttggtttgtttgtacatggatgggtgtttgggttgtcccacctttctgctcttgtgtatagttctgctgtggagcatatgcaagtattcgtttgagagtccttgttttttattcttttgagtatgatacctacaagtattgctgggtaactccacgtttagctatatttatttatttattttttgagacacagtcttacactgtcacccaggctggagtgcaatggcgcgatttcggctcaatacaacctctgcctcccgggttcaagcgattctcctgcctcagcctcctgagaagctgggattacaggtgcctgccaccatgcccagctaatgttttttgtatttctagtagagatggggtttcaccatgttggccaggctgctcttgcattcctgacctcaggtggttcacccgcctcggcctcccaaagtgctaagattacaggcgtgagccaccatgccctgcccatgtttaacttttttgtttgtttgttttgagacggagtctagctcttatcaccaggctggagtgcagtggcgcaatctcggctcactgtaccatccgcctcctgggttcaagcgattctcctgcctcagcttcctgagtagctgggactacaggcacacaccaccacgcccggctaatttttgtatttagtagagtagtttcaccatgttggccaggatgtctcgatctcttgacctcgtgatccgcctgcctctttctcccaaagtgtgggattacaggcgagagccactgcgcccggcccgttttaactttttgaggaacgaatatactgttatctgcagaagctggaccattttacattccaccaacagtgggcaagggtttcatcttttccacatcccaacacttactttccattttttaattacagctatcccagtgggtgggaggtggtaacccactgtagcactgattggcattttcctaatgattcatgatatcaaacatctttccatgtgctttttggccatttgtatatctttggagattgaagtcctttgcgcattgtttaattgtgttgtcttttttattgttaagagagtcctttatatattctggaagctagatccttatcagagacatgatttgcaaatattttctgtcattctgtaggttgtcttttttactttgttgatgtcttttgatgcatagaagttttgattttgatgaaatctagtttgtctatttattttctcactcttttggaatcatatctgagaaatggtattgttttactcctgttttcttataagagttttatagtttaaagcttttacatttagttctttgatccattttgagttaatttttgtgtgcgctgtaaggtagggatccagcttcattttcttttatgtggatatgtaattgttccagcaccatttgtttaaaaaaactgtggtcttggcattgttgttgaaaatcagttggccataggtgtatgggttatttctagagtctcaattctattccattgttatctgtatatccttgtgcctgcactataatgttttggttactgtagctttgtagtaagttttgaaattaggaagtgtgagtccagcacatagtagaaacttgatatatacgtattattgttttggtcaactcattcattgaatgaccaatttattcaacaaatagtttagtctcctcagtgccaggccctttgctgggttctgtggatgtgaatagaaattaaaataaggtggagtcatccaacagttacaactgggtgccatacgaattttactataaatatgtactggacactacactgactcagctgtaggaacagagtaggctgggaagcacctttgagatgaggccgtctggatgtaagagtctgtttctggcagcagagacctggagtgtgggaggcctgcttgctctgttagggtttgaactgtatcctgacgatcatgggaggcattggaggatttttaggcaggaaaatgatgtgaagggatttgcatttaaaagagattatttgggactgggcacagtggctcacgcctgtaattccagcactttgggaggcctagacaggcgggtcacctgaggtgggaagcttgagagcagcctgccaaaatggtgaaatcccatctctactaaaaatacaaaaattagccaggtgtggtggtgcacctgtaatcccagctactcaggaggctgaggcagaagaattgcttgaacctgggaggggaggttgctgtgagctgagatcgcaccactgcactccagcctgggtgacagagtgagactccatctcaaaacaaaataaataaataaataagagaataaaatagataatttgggcaacaggttgatgttaattccccacctttgttcttctccttcagtactgtgttggctggtctgaatcttttggcttttcatataaatttctgaaactgttgctatctgttctctgcctgttttatttttgttgttgttgtttggattttttgtttttttgagatagagtcttgctctgttgcccaggctggagtgcagtggtatgatctcagctcattgcaacctccccctctcaggttcaagcgattctcttgcctcatcctcctgagtagctgggattgcaggcatgcgccaccatgcccagctaatttttgtatttttagtagagatggggtttcactatgttggtgaggctggtgtcgaactcctgacctcatgatccacccgcctcggcctcccaaagtgctgggatgacaggcatgagccaccgtgtctggcctctctgcctgttttttaagacttttgtctttggagttttgcggtttctccactgtggttttccatatgaattttcttttatttcttctgcttaaaatttgtaggccagttggtcatggtggctcacgcccgtaatcccagtactttgggaggccgggtgggtggatcgcctgaggtcaggagtttgagaccagcctgaccaacatggagaaaccccatatctactaaaaatacaaaattagccgggcgtgatggtgcatgcctataatctcagatactcgggaggctgaggcaggcgaattgcttgaaccagggaggcggaggttgcggtgagctgagattaggccattgcactccagcctgggaaacaagagcgaaactccatctcaaaaaaaaaaaaataataataataattgtaggccttccttaagaaaaataaaataaaattctaggctgggcgcggtggctcctgcctgtaatcccagtactttgggaagctgaggcgggtggatcacctgagttaggagtttgagaccagcctggccaacatggtgaaaccccgtctctactaaaaatacaaagatgagccatttgtggtggcacccatctgtaatcccagctactcgggaggctgaggcaggagaattgctggaacccaggaggcagaagttgtagtgaaccgagatcatgccactgcactccagcctgggtgacagagcgagatgccatctcaaaaaaataaaatataaaataaaattctaagccctgcaaccaactgaatggagccctccccttggtcaagggaaccccagagaaaccttggaagcttgagttcctggccgtagcaggagaggaggtcagacgcgcctcactgtacccctccctccccagccaccattaggcttcttcactaagggctaaacagaaaccagcccttttcaaagactctacactgctaatgtggattactggtttatcttcccagatacagattaaagacaagatgagattaatggttccttcacccttccctgagaggtctgcttagttctcttcctctgtttccttctatcttaggtaaaatgtacatttactgggcacttactgaagtctcacaagtacgtaaccactcacctcacagccaccctccctctttgaaggaccacatgtaattactaaacctcctgagaacctcttgggacagaaacaagcacagatgtgccgtgactcatgtttttcctgtgggcaccctcaggctggctcagtagccctcacttgcttgagatcctgaatctgcgggttggcgtctttcatggttgctggatcatactctgccgttatctcttcggatatgagttgcccctagcccactatctggcccctctctttagggacctctgattgaacatacattagaccttctctctcctgctgttcctgatcactcttctgtcctgtaattgctgcttcttgtgctgcattctgggtaatttcttctggtcttttttccagtttactaatattgtattctgttataaggtccttccattgagtgtttctttctttcttttttcccaaacagcaactcaaaacagacattgagttttaattttggttcctgtactttttatttctagaagttctatttggttatttttcaagtctgctacattattacataattttttaataattttatatctttaatagatagttttttgttttgttttgttttgttttgttttttgagacagagtctcgctttgttgcccaggctggagtgcagtggtgcaatctcagctcacagcaacctccgcctcccaggttcaagtgattcccctgcctcagcctcccaagtagctgggattacaggcacgcatcaccacgcctggctaattttttgtgttttagtagagacagggtttcaccatgttggccaagacagtctcgatctcctgacctcgtgatctgcccacctcggcctcccgaagtcctgggattacagagctgagccactgcgcctggcctttgatagatatttcaagttcatcttttttttttgcttccttaatttttttttttgctataccccatgcctccaagataacagttttttctttttaatttaaatataatacagttttactgtgtatccaagaatatctgaaatctttcgtgggtctctttcttttgtcttttgtatctgttgctttttgctgggctgagcctgcttaaaacaagccccgttagctgtaaaggtttaccttagaaagtcaggtgtcttcctctgtaactctctcccttttccatctgctccaaggcatttatttatattaatcttgacgcaaagggaagttgtgtccacttcaccttggccagtaaggaagcagtgtttggcagatgttgttactcctaataatgccagccagtgagtgaagctgacctgaatgcctcccagggctgaggcaatggcatgatcaccgaagctcaaaccagagacagtttcacctttctgactgaatagtgttcggtgtaggccaaatgcctgcagactactgtttgaggactggtgtggtctaccaggtgtttccttagcgcctggatgtctctggctgccatcccagggatagagcatggtgttagatacgctagatgcctgccgaagtaattatgggtgaaacatatgatgtccaagatttgcttttaaaggctccaatacctcctcccagattccggagggctgtgaaacaattagctatgaaaactggtaattcctgaagctgggtacatgggggttcatgatccctctctcaccttttttgggggagaatgtttgagactttaataagaacttgttgccttttccttttacagggtgttgcaggcatcttcctcaggcctgttttctctgttttccaggctgacgtgatggcagac

SEQ ID NO: 13997 - DNA, 779 bp, Homo sapiens
ctgcgcggaacatggcgttctggggttggcgcgccgcggcagccctccggctgtggggccgggtagttgaacgggtcgaggccgggggaggcgtggggccgtttcaggcctgcggctgtcggctggtgcttggcggcagggacgattattaaaggtggaagaaggtccatatctttttctgtgggtgcttcaagtgttgttggaagtggaggcagcagtgacaaggggaagctttccctgcaggatgtagctgagctgattcgggccagagcctgccagagggtggtggtcatggtgggggccggcatcagcacacccagtggcattccagacttcagatcgccggggagtggcctgtacagcaacctccagcagtacgatctcccgtaccccgaggccatttttgaactcccattcttctttcacaaccccaagccctttttcactttggccaaggagctgtaccctggaaactacaagcccaacgtcactcactactttctccggctgcttcatgacaaggggctgcttctgcggctctacacgcagaacatcgatgggcttgagagaggagtcctgccaagcccagaagttgtgctcttggccttgcgtgctcatctcggaggcggcagcaacacttcgctttggcttgaatttcagtgtcgggcatccctgcctcaaagctggttgaagctcatggaacctttgcctctgccacctgcacagtctgccaaagacccttcccaggggaggacattcgggctgacgtgatggcagac

SEQ ID NO: 13998 - DNA, 20224 bp, Homo sapiens
acttggctgtgccattgaggcgtcaaagagtgtgggcgcctgtggtcgaacccgctacggactagctttgtggtgtcagcctttgtgacccggaattgctcctgtcaaatgaggatcttcccagtagtgttttgcgaggattaggtgtaaatataatgcctgaccatagtaaaagcgctcagaaagtattaactatcaccgccatccgggttgaaaaaggtgtgagcgcagggtacagaaatgctggctccaggtttgacctccggggcgagagatgagacaccagactagggaacttcctctactcgcctctacgtctacctgggcgcgccggaggcgtcggcaaggaggcgggggcggggcgcggaggcgggaccggggcgccgggggcgggggcggtaggcggaggcggggctggggcgccgggggcgggggtgggaggcggaggcggggccggggcgccgggggcggggcgagtccggaggactccttggactgcgcggaacatggcgttctggggttggcgcgccgcggcagccctccggctgtggggccgggtagttgaacgggtcgaggccgggggaggcgtggggccgtttcaggcctgcggctgtcggctggtgcttggcggcagggacgatgtgagtgcggggctgagaggcagccatggggcccgcggtgagcccttggacccggcgcgccccttgcagaggcctcccagacccgaggtgcccagggcattccggaggcagccgagggcagcagctcccagtttcttcttttcgaggtattttgggcaaggacaagcacttcttgcgtgttcgttgtcgacacctcgcccactctttctcaccttgccgtgtttcctttgcggcatgtctgggagtttacgtgcgttccaacaccggggcctccgtctttatgctgatctgtggacgtcacttatgggggttttgtcgtttatttcaccattccctcattgaaatacgttctaacctttagttattgtgcatcatgctgtggtgaataaccttgttggcacctcactgtttgcataaattcctagtactgggattgctaggtccaaaagtatatgcatttaacgctttaatgatccctcataaatgttgtgcggttaatactcccactggcatgtgatcgtacccgtctccatagtaattgcatctaagaactgaggctacataggaaaaaatcttaaggtccatggttgttaggtatcagatgccctataatggatgaatatttaagtaaataatggcacattgacttgctgtctgacacaactgctgaaaatgttggtgaaaagtgagtctcgaagtggtagctcacacttgtaataccagcactttcggaggctgagacggggatcgctcgaggccaggagttcaagagcagcctgggcaacataacgagacccccatctctaccaaaaatttaaaaattagccgggcatggtggcgcaagcctgttgtcccagttactcctgagactaaggcaagaggatcccttgagtccaggagttcaaggctgcagtgagctatgattgagccactgcactccagcctgggtgacagagcaagactcttatctacctgtgggaaaaaaaaaagaaaaaagtttaatagatcctgaagagttggccgggcgcggtagctcacgcctgtaatcccagcactttgggaggatgagacgggtggataacgaggtcaggagttcgagaccagctgggccaacatggtgaaaccccatttctactgaaattacaaaaattagccgggcgtggtggcgggcgcctgtaatcctagctactcaggaggcggaggcaggagaatcacttgaacccggaaggcagaggttgcagtgagccgagatggcaccattgcactccagcccgggcgaaagagcaaaaactccgtctcaaaaaaaaacaaagatcccgaagagtcagtcgttcatccaagaagccctgactgagctcttattctgtgccagactctgttctaggtgctatggatggagcagggaccaggacctacaaacacgtggagcgcattctaatatctgtgatactctgcaaaactgttaaaacaaatccttgcggccgggcgcggtggctcacgcctgtaattccagcactttggaaggccgagacgggcggatcacgaggtcaggagatcgagaccatcctggctaacacagtgaaaccccgtctttactaaaaatacaaggaaattagccaggcgtggtggcgggtgcctgtagtcccagctactcgggaggctgaggcaggagaatggcgtgaacctgggaggcggagcttgcagtgagccgagatcgcgacactgcactccagcctgggcaacagagcgagactccgtctcaaaacaaaacaaaacaaaacaaaacaaaaatccttgctaccactggccctaaagcaggaggcatagggctgcgtgtgaggagtagtccattgcatgggcttcctccagtttggctttggatttttgagctctctgaatttgttgtttgtgtcctttgcacagtgtccctcccaggttgcacccatgcctgcccctcagggtcccccactcccagtgaatttcacaccatgcagcatgtactttaagccatacatcttacgtatgttccagacatttggtaaaacgccgtttatgtgtttttcagtgactcacaaacattttatttacgtaaatgaggaatgtactcaggcacccttcgtgataccttgccctcagcaggcactcaacagcaataataactttcattccttttgtgcttctcttaacagttcgtgtttagtaggagcacagtagctgtttggggaacgaccttaagtgaatagatgtctgaaatgctgtgtgaagtggggcgcttaataggtggtgagatggttttagaaccagggttttccctctttgcttcttgactccttaaccagttttcattaggagacccctttggaggtttgcagtcagtcagagttgagtgcctactgagtgtactgaattatgaaatgagcacagttcccattaacctgaattttttgctcccaagtaagtcttgatttctgatttatgactgctttttgttgtaccccaatagtcgtctaagaaaggtgattattttgagaggcctggggagacacacatgctcattctcgagggtggcggtggtgcagagggcagagccatgctcgttcttgctatcctgagattggttgctatctgtttcctttgctgctgtgtttttttctgtcagtattaaaggtggaagaaggtccatatctttttctgtgggtgcttcaagtgttgttggaagtggaggcagcagtgacaaggggaagctttccctgcaggatgtagctgagctgattcgggccagagcctgccagagggtggtggtcatggtgggggccggcatcagcacacccagtggcattccagacttcaggtactgcccacagtcccacctgccttctgcgctcccctcccctgactcctgccctccccactgcccagtttattccacttccctgtcctcttccaaaggcctcagagcctttcttctctccctgcagatcgccggggagtggcctgtacagcaacctccagcagtacgatctcccgtaccccgaggccatttttgaactcccattcttctttcacaaccccaagccctttttcactttggccaaggagctgtaccctggaaactacaagcccaacgtcactcactactttctccggctgcttcatgacaaggggctgcttctgcggctctacacgcagaacatcgatgggcttgagagaggtgagccctctgtgagtcgcacacattctttttctcccacggaggctcgggtgcctgtttctcccagggaggctcgggtgcctgtttctcacaggggatgctcgggtgcctgtttctggggacggccaaaacctatcgcttatgcttcttccttgggactttttttgagccaactagttagggctttgttcccaaggaaaatgtcctctgggtgtttaaaggccactgcttgttctcctgcatacctgcagagctgtgtattttgggcagaagttgacattgttttgccaatctggtgtgatgatctctttttttcttctctcttttaagaagtgtattatggaatttttttgagcacacacaaagagagcaatgtaacgaaccgtcctgtcctcatcaccagcacacagccagttcttcctgcgtcctcaccaccttcttccaaatccccagattattttgaagcaaatctctcacatcatgaatttaatctagaaataatctataaacacatgaatggatagctctagagaatactttaaaaacaactccggccgggtgccggattacaggtgtgggatcacacctgtaatcccagcattttgggaggccgaggcaggtagatcacctgaggtcgggagttcgagaccagcctggccaacgtggcaaaaccccgtctctactaaaaatacaaaaaattagccaggcgtggtggtgtgtgcctgtaatcccaggtactcgggaggctgagacaggagaatctcttgaacccagcaggcggaggttgcagtgagccgagatcgtgccacttcactccagcctgggcgacagagggagattctgtctcaaaaaaataaataaaaataaaaataattaaaaaataaaaacaactctgatagtgattcacactgaagaatcactagtaattccttaatatggtcacacttagtctgtggtgatttcttgaccgtatccatatggtgcccaaaccagcgattcacaggttgtgccaacttctggccgtgcacctaacggaagcacttggtggggccttttccttacgtgcagtgatgcagacaggtgctgggacagtcagctctccgggagccaggctcccggagagactgctgatgtgttgtcagttaaaaagaggtggcaccttggctccaggaatgtgtttccttgccagaaggatcccctgacttggaaccacagaggcagcagcggatgccccatgttggtgggctcttctcccagaggtgcagcagggcaggccttgtgggaaggtgggagctcctggctgtgagattcagcactgctgagttagggcagcgacagggacttgggaagcctcctgcagctgggaccctggctgtgccaccgcagcctttcagaaccagttaatactaacacaactttcataagaagtcactttttgtctgtttctaccaagcaattcttttggaatttatgatatttatatcctcattttaacttggtatctgtagaatagaagatatgttcctggatattagatataaatttttgagacagggtcttggctctgttgcccaggctagagtgcagtggcatgatcatagctcactatagcctgaactcttgggccgaagtgatccttttgcctcagcctctggaatagctgggactacgggcatgcactaccatgcctggctaattaaaaaaattttttaagacaagtctcactatgttgctgaggctggtctcaaactcctggcctcaagtgatcctcctgccttggccttccaaagcactgggattacaggcatgagccactgcacccagcctggtattaggtgtaatttttttttttttttttgagacagaatctcgctctcttacccaaactggagtgcggtggcacgacctcagctcactgcaacttccacctcccgggttcaagcgattctcctgtctcagcctccccgagtagctggcactacaggtgcctgccaccacatctggctaatttttgtatttttagtagaggtacggtttcaccatgatggccaggccggtcttgaactcctagcctcaaatgatctgcccacctcggcctcccaaagtgctgggattacaggtgtgggccactgtgcccggctggatataattttatttgagcttttatcaaatggtttttcgtactgagttttgacaggctttgttttaaccgtgatttggctccagctaggtgcccctttgctcccctgccttattctggttgatggcgcatgtaggtgatacgggcatgaaaaccaggcttgaggacatcacaaccccaaggggctgtgcctccttccaggagtcctgccaagcccagaagttgtgctcttggccttgcgtgctcatctcggaggcggcagcaacacttcgctttggcttgaatttcagtgtcgggcatccctgcctcaaagctggttgaagctcatggaacctttgcctctgccacctgcacagtctgccaaagacccttcccaggggaggacattcgggtgagttatcctgctgttggttgtccttctgcagtttgctgttggggtgatctggaaaagtggtattttataagcattgtctcgaaaggacagttgaacaataatagtgtgaaacattttatttgtaaattagaaaatcaatacatgcttgtaaaaaaatttaagacaatatagaaatatgtagggaaaatgaatctcccttcagccaattccagctgcccactttttttttttttttttgagattgagtctcactctgtcgcccaggctggagtgcagtgggcgatctcggctcactgcaacctccgtctcccggattcaaggaattcttctgcctcagcctcctaagtagctgggattacaggcgtgagccaccacgcccggcaatcagatggccttttgtgccgagcttatttcctgaaaatgtttctcgctccttcgccttgtagcttgtgttagtatttcatcctgtttcatggctaaatgttccactgatgtatgcaccacagttggtttgtttgtacatggatgggtgtttgggttgtcccacctttctgctcttgtgtatagttctgctgtggagcatatgcaagtattcgtttgagagtccttgttttttattcttttgagtatgatacctacaagtattgctgggtaactccacgtttagctatatttatttatttattttttgagacacagtcttacactgtcacccaggctggagtgcaatggcgcgatttcggctcaatacaacctctgcctcccgggttcaagcgattctcctgcctcagcctcctgagaagctgggattacaggtgcctgccaccatgcccagctaatgttttttgtatttctagtagagatggggtttcaccatgttggccaggctgctcttgcattcctgacctcaggtggttcacccgcctcggcctcccaaagtgctaagattacaggcgtgagccaccatgccctgcccatgtttaacttttttgtttgtttgttttgagacggagtctagctcttatcaccaggctggagtgcagtggcgcaatctcggctcactgtaccatccgcctcctgggttcaagcgattctcctgcctcagcttcctgagtagctgggactacaggcacacaccaccacgcccggctaatttttgtatttagtagagtagtttcaccatgttggccaggatgtctcgatctcttgacctcgtgatccgcctgcctctttctcccaaagtgtgggattacaggcgagagccactgcgcccggcccgttttaactttttgaggaacgaatatactgttatctgcagaagctggaccattttacattccaccaacagtgggcaagggtttcatcttttccacatcccaacacttactttccattttttaattacagctatcccagtgggtgggaggtggtaacccactgtagcactgattggcattttcctaatgattcatgatatcaaacatctttccatgtgctttttggccatttgtatatctttggagattgaagtcctttgcgcattgtttaattgtgttgtcttttttattgttaagagagtcctttatatattctggaagctagatccttatcagagacatgatttgcaaatattttctgtcattctgtaggttgtcttttttactttgttgatgtcttttgatgcatagaagttttgattttgatgaaatctagtttgtctatttattttctcactcttttggaatcatatctgagaaatggtattgttttactcctgttttcttataagagttttatagtttaaagcttttacatttagttctttgatccattttgagttaatttttgtgtgcgctgtaaggtagggatccagcttcattttcttttatgtggatatgtaattgttccagcaccatttgtttaaaaaaactgtggtcttggcattgttgttgaaaatcagttggccataggtgtatgggttatttctagagtctcaattctattccattgttatctgtatatccttgtgcctgcactataatgttttggttactgtagctttgtagtaagttttgaaattaggaagtgtgagtccagcacatagtagaaacttgatatatacgtattattgttttggtcaactcattcattgaatgaccaatttattcaacaaatagtttagtctcctcagtgccaggccctttgctgggttctgtggatgtgaatagaaattaaaataaggtggagtcatccaacagttacaactgggtgccatacgaattttactataaatatgtactggacactacactgactcagctgtaggaacagagtaggctgggaagcacctttgagatgaggccgtctggatgtaagagtctgtttctggcagcagagacctggagtgtgggaggcctgcttgctctgttagggtttgaactgtatcctgacgatcatgggaggcattggaggatttttaggcaggaaaatgatgtgaagggatttgcatttaaaagagattatttgggactgggcacagtggctcacgcctgtaattccagcactttgggaggcctagacaggcgggtcacctgaggtgggaagcttgagagcagcctgccaaaatggtgaaatcccatctctactaaaaatacaaaaattagccaggtgtggtggtgcacctgtaatcccagctactcaggaggctgaggcagaagaattgcttgaacctgggaggggaggttgctgtgagctgagatcgcaccactgcactccagcctgggtgacagagtgagactccatctcaaaacaaaataaataaataaataagagaataaaatagataatttgggcaacaggttgatgttaattccccacctttgttcttctccttcagtactgtgttggctggtctgaatcttttggcttttcatataaatttctgaaactgttgctatctgttctctgcctgttttatttttgttgttgttgtttggattttttgtttttttgagatagagtcttgctctgttgcccaggctggagtgcagtggtatgatctcagctcattgcaacctccccctctcaggttcaagcgattctcttgcctcatcctcctgagtagctgggattgcaggcatgcgccaccatgcccagctaatttttgtatttttagtagagatggggtttcactatgttggtgaggctggtgtcgaactcctgacctcatgatccacccgcctcggcctcccaaagtgctgggatgacaggcatgagccaccgtgtctggcctctctgcctgttttttaagacttttgtctttggagttttgcggtttctccactgtggttttccatatgaattttcttttatttcttctgcttaaaatttgtaggccagttggtcatggtggctcacgcccgtaatcccagtactttgggaggccgggtgggtggatcgcctgaggtcaggagtttgagaccagcctgaccaacatggagaaaccccatatctactaaaaatacaaaattagccgggcgtgatggtgcatgcctataatctcagatactcgggaggctgaggcaggcgaattgcttgaaccagggaggcggaggttgcggtgagctgagattaggccattgcactccagcctgggaaacaagagcgaaactccatctcaaaaaaaaaaaaataataataataattgtaggccttccttaagaaaaataaaataaaattctaggctgggcgcggtggctcctgcctgtaatcccagtactttgggaagctgaggcgggtggatcacctgagttaggagtttgagaccagcctggccaacatggtgaaaccccgtctctactaaaaatacaaagatgagccatttgtggtggcacccatctgtaatcccagctactcgggaggctgaggcaggagaattgctggaacccaggaggcagaagttgtagtgaaccgagatcatgccactgcactccagcctgggtgacagagcgagatgccatctcaaaaaaataaaatataaaataaaattctaagccctgcaaccaactgaatggagccctccccttggtcaagggaaccccagagaaaccttggaagcttgagttcctggccgtagcaggagaggaggtcagacgcgcctcactgtacccctccctccccagccaccattaggcttcttcactaagggctaaacagaaaccagcccttttcaaagactctacactgctaatgtggattactggtttatcttcccagatacagattaaagacaagatgagattaatggttccttcacccttccctgagaggtctgcttagttctcttcctctgtttccttctatcttaggtaaaatgtacatttactgggcacttactgaagtctcacaagtacgtaaccactcacctcacagccaccctccctctttgaaggaccacatgtaattactaaacctcctgagaacctcttgggacagaaacaagcacagatgtgccgtgactcatgtttttcctgtgggcaccctcaggctggctcagtagccctcacttgcttgagatcctgaatctgcgggttggcgtctttcatggttgctggatcatactctgccgttatctcttcggatatgagttgcccctagcccactatctggcccctctctttagggacctctgattgaacatacattagaccttctctctcctgctgttcctgatcactcttctgtcctgtaattgctgcttcttgtgctgcattctgggtaatttcttctggtcttttttccagtttactaatattgtattctgttataaggtccttccattgagtgtttctttctttcttttttcccaaacagcaactcaaaacagacattgagttttaattttggttcctgtactttttatttctagaagttctatttggttatttttcaagtctgctacattattacataattttttaataattttatatctttaatagatagttttttgttttgttttgttttgttttgttttttgagacagagtctcgctttgttgcccaggctggagtgcagtggtgcaatctcagctcacagcaacctccgcctcccaggttcaagtgattcccctgcctcagcctcccaagtagctgggattacaggcacgcatcaccacgcctggctaattttttgtgttttagtagagacagggtttcaccatgttggccaagacagtctcgatctcctgacctcgtgatctgcccacctcggcctcccgaagtcctgggattacagagctgagccactgcgcctggcctttgatagatatttcaagttcatcttttttttttgcttccttaatttttttttttgctataccccatgcctccaagataacagttttttctttttaatttaaatataatacagttttactgtgtatccaagaatatctgaaatctttcgtgggtctctttcttttgtcttttgtatctgttgctttttgctgggctgagcctgcttaaaacaagccccgttagctgtaaaggtttaccttagaaagtcaggtgtcttcctctgtaactctctcccttttccatctgctccaaggcatttatttatattaatcttgacgcaaagggaagttgtgtccacttcaccttggccagtaaggaagcagtgtttggcagatgttgttactcctaataatgccagccagtgagtgaagctgacctgaatgcctcccagggctgaggcaatggcatgatcaccgaagctcaaaccagagacagtttcacctttctgactgaatagtgttcggtgtaggccaaatgcctgcagactactgtttgaggactggtgtggtctaccaggtgtttccttagcgcctggatgtctctggctgccatcccagggatagagcatggtgttagatacgctagatgcctgccgaagtaattatgggtgaaacatatgatgtccaagatttgcttttaaaggctccaatacctcctcccagattccggagggctgtgaaacaattagctatgaaaactggtaattcctgaagctgggtacatgggggttcatgatccctctctcaccttttttgggggagaatgtttgagactttaataagaacttgttgccttttccttttacagggtgttgcaggcatcttcctcaggcctgttttctctgttttccaggctgacgtgatggcagacagggttccccgctgcccggtctgcaccggcgttgtgaagcccgacattgtgttctttggggagccgctgccccagaggttcttgctgcatgtggttgatttccccatggcagatctgctgctcatccttgggacctccctggaggtttgtcagcaggcctgtgcagggaggaggctggagggcaggggaagggaggggtacaggagtcatctcatgggctgtcggcaggcctgtgcagggaggagtctggagggcaggggaagggaggggtacaggagtcacctcatgggctgtcggcaggcctgtgcagggaggaggctggagggcaggggaagggaggggtacaggagtcatctcatgggctgtcggcaggcctgtgcagggaggaggctggagggcaggggaagggaggggtacaggagtcatctcatgggcccttccagggctggtgccactttgggaaggtgaatggattcagctggggttccaggctgagggagcagcagcctgtgcaggagacaggaaggtgggaagctgctgggctttggaggtggtataggtgtgggtggggcaccacgtgtgaggagaagggagaaggatgggggtgtgggggcgaggtggaggggcagggcctcccaggtcagatcaggaatactgatgctgcagtgggaggagtgataaatccacagggactggcccggggacgtagctgcacccttggggtcagggaggcctttggggagtggagagtggagcaagcagtgccaggaggctggtcctggagaaggtggagctgtggtcgcctgagggatggcgaggagggggactggactcgcagtctgtgatgttttggggacgtgagaaggaggcgtctggcttggtctgtaaggtcagggcacttgctggtgaggcgtgatttgggagggaggatgcccagctcggttctgtgtgtgtctgaggtgtcgggaaacatgccctggatgtgttcaagcagctgttctgcgtctgcgtctgcagctcaggaaattcctaaaagctgtgatgagagcaagaaatgagaccatgaagtcagtgtgtgcgtgactggatgtaggcaccgaggacagaagggccagaaagacctgtgctcagaggggcccagggcagccacaggggcccagagcatgtgtttgttcaggcattcattgtgtgctgggccctgctccagtgctttggacatacacggtcagatgtcagtgtaagaagttatatagtttgttaggagatgattgatgttatgagaaagataacaagtaggatagaaaggctagaagggttgggaaccagctgcagtgtcaagtcaggcaggtggagttggatctaagagtttaccgaggtgaggagggtctggcaggggacactgcacaggtgacaagcagcaaggagggtggggcgaagtcagcattgatggccacggggctggagcagagaagaaggtggggcacaagtgtcatctcatgggaggctggcgccacctcagaaggtgaatgggttcagcttgggttccaggccagagtctgaagttgagaggactccgttgggtgctgggctgtgagcccaccatgggggcaagactgggagcagcagacccagcagggcccttgtaggtaatcaccggctggcactggctgggggccaggtaaagccagcagaggctgaggggtgctggagtctgggtgtgtgtgaacgcagagtgggtacgctggcacagtgcatgggaggccgtggattcccaaggaccccagggctgtggctggagcagctggaaagacggagccgccgcttcctgagatggagaagcctggtaggtgggtttgggggagctcaggaactcagccttgtttccacggatttgaggatgtgctgcggactggaggtgttgagcaggtggacatgagtctggagtccaggaaggcccagaggcaggagctggggtgctggagtgagcagacaggagagcccagggtgtggacagacatgagaatgccatgctaggcctaggatggagggacagacacaggaggagcagtcagaggggccatggtggtcagcacagtgtgggctgagaccagctgaccgtgctggccaccaggtgtggacacttgggccaccagccatctttattgttgaagtgaaatgaaaatggcctttttcctgattataagtgtatcatgtgtgtctttgaaaagattcgtacattatataaagatataaagcaaaggatcaactttttaatcccaccaactgttagcattttattctgtgtcctctcagctttcttttttttgtacaaatgcatacgtacagatggtaattttaaactaaaagttggacagcactgtacattctattctgcagcctgctgttttcacgtaacaatgtgagtccatggagatgtgctgcgttgttaatgccaacagtttcccttacacggatatgaggtcccaactgagaaacccatgtctgtaaggctggtgccatcatgaactgaatgagctggtgtcacgcacagactctatctcatgtgctttgtggacgaaatgttaatgtgtttgactgtggagtaccactccagatcccctttaggtgtgacataacgtgggatgtaaaccatatgatcttttctaaaatctcaaaaattctgaaacatattcagccacaagagctttaacatagattttgtggatttaatacaaaatttatgtaagcaatttcttactgatggacaatgataataaatagtatataatttttacattaaaagtaatgctgggccaggcaccgtggctcacacctgttatcccagcactctgggaggccaaggcaggaagattgcctgaagctaggcatttgagaccagcctgggcagtatagtcagacctcgtctctacaaaaaataaaaagatagccaggcatggtctgtgtagttgcagctatttgagaggctgaggaaggaggattgcttgagcccaggaatttgaggttatagtgaactatgatcatgccactgcattccagcctgggtaacagaatgagatcccgtgctgtagtgaatatccctgtgtatcatccttatctactcatgcaagtactcctgaagggtaaatgctgtagtgaatatccctgtgtatcatccttatctacccatgcaagtactctggaagggtaaatgctgataaatactgagaacttgccttccggtgaatatccctgtgtgtcatccttatctacccatgcaagtactcctgaagggtaaatgctgtagtgaatatccctgtgtatcatccttatctacccatgcaagtactctggaagggtaaatgctgataaatactgagaacttgccttccggtgaatatccctgtgtgtcatccttatctacccatgcaagtactcctgaagggtaaatgctgtggtgaatatccctgtgtatcatccttatctacccatgcaagaactcctgaagggtaaatgctgataaatattgagaacttgccttccagaaagatgtaacaattacactgccacaaactgtgtttttatgtagccattttatcacatcctcaccaaaaccaaaatcacacaaatcaaattggttaaaaaatgcatgtgtgtgtgtggaggggggtgcggattttgcctttctgtagtaaagaatgaagttcatcttttcatgtttattgccagttgtgtttcttctctttggattgtatatttgtacctcttgaccatttttcattgggtcattataaattagcaatataaattagttttaattttagtataaattaaataatataattacattttaatgttaatataaacttctttcttttttttttttttttttttgagacagagtcttgctctgtctcccaggctggaggttcagtggcgcgatctcggctcactgcaacctccacctcccaggctcaagccattctcctgcctcaacctcccgagtagctcggattataggtgcgtgccaccacgcccagctaagttttgtatttttagtagagacgtggtttcactatgttggccaggctggtcttgaactcctgacctcagctgatctgcccgcctcggcctcccaaagtgctgggattataggtgtgaaccaccatgcccagctgttaatataaatttcattataaattagcattataaattagttcataaattatatgtttataaatgagtttatcaattagcaatataaactattgtcatatgttgtaaatatttttgcagtttatgatgatgagaggtttttaaaaattttaaattttctacatagtagttttatgtagataccgagataatagtatttacatagtcagatctgtcattttcctttgccttatctgacttcagtttttacgcctagaacgttcttccctatccttacttgtaaatccttagttttcttcaagaactgttttgtttacattgaaacctttaatccatttgaatttttttcagtgggaggtaggaatggagtattttcctcccagataatgagccagttttaatgccatttattaatgtatccatttttttaccttgttcctcttaaaagaagctttgagagctgtatgaagaagcctgatggcaccgagctaggcctctctagaggctgggtggggaagaccatggagagacgtaacagtaactcctgctcgggggcaccagctcgtctgggtgcccgatgctggtggtggctgtcagagcaagcagggctagccagaggagatggacgagtctgtgctgttgtccctctgcgtcatgctgggagacagcgaggtggggaggacagggagaacagaacgtgctcacaaagaggaggcaggaaggttggatccctgatgagccttggaacggaggtggggaaaagcaaggatgtgtggaaacagcaagaagtgggagagagagagagaggcggaggggagaaaaccgtcacggaggccaagcggcaggagctcagctgaagaaatgagattggtggtgggttttccctatatcgcaggctctgactgccaatctgctgctcctccaaggcctcggtggctgtggcatgaaacatcctgaggagcttgtaaagtggacactgtgcccctcacgtttggcccatttttcaggtggagccttttgccagcttgaccgaggccgtgcggagctcagttccccgactgctcatcaaccgggacttggtggggcccttggcttggcatcctcgcagcagggacgtggcccagctgggggacgtggttcacggcgtggaaagcctagtggagcttctgggctggacagaagagatgcgggaccttgtgcagcgggaaactgggaaggtacagactgctgaggaggaccatccaaggggctgcccttctcactgctctagggtatggtccacctgatatggagccccgttggttaacacagtaacagtaatagctgatgatgctgtgaatcctgcaccaggcactacctggacctgactgggtgttactttcaatacctccatttagagatgaggaaacagatgctaacaggccaagcagggacacggtccagacactcagggctgatgagtctgtattcttaacagactataggcgttaccttcactccctaaaataaagcagccaacagtgtccctctaaggcctggtatgtgattctaagatgatacgggttaaagaactttgagaagctaaagttctctgcatctatgtgggatgaaggctacatgagtgatgcttttcggaagtaattggtatgagagccattgatcaattataatccgctgaggaaagccaaagagccttgatgctttctaagagatttcaaaccgcctataaacaagtgaagttacagaaaatgcagtttcccataagaatcatgtagcatgtgtagccttgatattaagggttttcaatgggaggtggtagcattaagcatttaaagtccagtgtcatgattacaggcaggtgtaacactgtccaaaggggatttcaccagtgtattagtctgttctctggctgctcataaaggcatacctgagactgggtaatttataaaggaaagaggtttaatggactcacagttccatatggctgtgggggcctcacaatcatagtggaaggcaaagcaggagcaaagtactgtcttacaaggtggcaggcaagaggacgtgtgcgggggaactgccctttataaaactatcagatcttgtgagacttattcactatcagaagaagagtgtgggaaagacccgcccccatgattcagttacttccacttggccccacccttgacacatggggatgattacaattcaaggtgagatttgggtggggacacagccaaaccatatcaactacaatatatcacagttgatgctcctcttgccttccaaggcagatgtcttaggaaatcctgatcctttttccttgtccacagctgtggctgcctcatggctcagggccatggggtcagcactctcctcacctccaccagtccaagacctccaacctctggttgcaggctgattttttaccaatcatggtcacttcattatggaggcagggaacccagctaacaatgaggcttaaacgctgagaggcgagtgcctcctggccagctcacaaggcagcggagatcttagatcagcccagcaggcttttttgagggatccttttcctgctccaacttcatattttcttttttttgtaatggagtttcactcttgttgcccaagctggagtgcaatggcacgattttggctcactgcagccctgcctcctgggttcaagtgattctcctgcctcagcctcctgagcagctgggattacaggcatgtgccaccatgcctggctaatttctgtacttttattagagatgggatttcatcatgttagtcaggctggtctcaaactcctgacctcgggtgatccacctgcctcagcctcccaaagtgctgggattataggcatgagccagcaggcccggcccaacttcctgttttcatagaaaagcagattgtaactctggtagctcctgtggagttttggaagtggcttaataggatttgaactgtataatctagtttcagagaaatgtatgtaaaatgggttatgatttcattttctgttttttacagcattactatccaaggggttacttttccaaatagtgaatgcttttaagcacatgagcatcagtacatattgatttgggtactttaagacccatagaatgaggctctccatttagccaccctgttctgcccaggcctgctgggatcctcttagcccagcacagcagcagcagtatttgcagaaagcagcttgttttgtgaaatattttgcatgtctgcagctagagctgtttgaacagagatctgctggcctgcctgggtgtgtaaacagatagctgataccctctgtcttctgtattccagcttgatggaccagacaaataggatgatggctgcccccacacaataaatggtaacataggagacatccacatcccaattctgacaagacctcatgcctgaagacagctt

SEQ ID NO: 13999 - DNA, 1225 bp, Homo sapiens
acttggctgtgccattgaggcgtcaaagagtgtgggcgcctgtggtcgaacccgctacggactagctttgtggtgtcagcctttgtgacccggaattgctcctgtcaaatgaggatcttcccagtagtgttttgcgaggattaggtgtaaatataatgcctgaccatagtaaaagcgctcagaaagtattaactatcaccgccatccgggttgaaaaagtattaaaggtggaagaaggtccatatctttttctgtgggtgcttcaagtgttgttggaagtggaggcagcagtgacaaggggaagctttccctgcaggatgtagctgagctgattcgggccagagcctgccagagggtggtggtcatggtgggggccggcatcagcacacccagtggcattccagacttcagatcgccggggagtggcctgtacagcaacctccagcagtacgatctcccgtaccccgaggccatttttgaactcccattcttctttcacaaccccaagccctttttcactttggccaaggagctgtaccctggaaactacaagcccaacgtcactcactactttctccggctgcttcatgacaaggggctgcttctgcggctctacacgcagaacatcgatgggcttgagagagtgtcgggcatccctgcctcaaagctggttgaagctcatggaacctttgcctctgccacctgcacagtctgccaaagacccttcccaggggaggacattcgggctgacgtgatggcagacagggttccccgctgcccggtctgcaccggcgttgtgaagcccgacattgtgttctttggggagccgctgccccagaggttcttgctgcatgtggttgatttccccatggcagatctgctgctcatccttgggacctccctggaggtggagccttttgccagcttgaccgaggccgtgcggagctcagttccccgactgctcatcaaccgggacttggtggggcccttggcttggcatcctcgcagcagggacgtggcccagctgggggacgtggttcacggcgtggaaagcctagtggagcttctgggctggacagaagagatgcgggaccttgtgcagcgggaaactgggaagcttgatggaccagacaaataggatgatggctgcccccacacaataaatggtaacataggagacatccacatcccaattctgacaagacctcatgcctgaagacagctt

SEQ ID NO: 14000 - DNA, 20193 bp, Homo sapiens
gcgcggaacatggcgttctggggttggcgcgccgcggcagccctccggctgtggggccgggtagttgaacgggtcgaggccgggggaggcgtggggccgtttcaggcctgcggctgtcggctggtgcttggcggcagggacgatgtgagtgcggggctgagaggcagccatggggcccgcggtgagcccttggacccggcgcgccccttgcagaggcctcccagacccgaggtgcccagggcattccggaggcagccgagggcagcagctcccagtttcttcttttcgaggtattttgggcaaggacaagcacttcttgcgtgttcgttgtcgacacctcgcccactctttctcaccttgccgtgtttcctttgcggcatgtctgggagtttacgtgcgttccaacaccggggcctccgtctttatgctgatctgtggacgtcacttatgggggttttgtcgtttatttcaccattccctcattgaaatacgttctaacctttagttattgtgcatcatgctgtggtgaataaccttgttggcacctcactgtttgcataaattcctagtactgggattgctaggtccaaaagtatatgcatttaacgctttaatgatccctcataaatgttgtgcggttaatactcccactggcatgtgatcgtacccgtctccatagtaattgcatctaagaactgaggctacataggaaaaaatcttaaggtccatggttgttaggtatcagatgccctataatggatgaatatttaagtaaataatggcacattgacttgctgtctgacacaactgctgaaaatgttggtgaaaagtgagtctcgaagtggtagctcacacttgtaataccagcactttcggaggctgagacggggatcgctcgaggccaggagttcaagagcagcctgggcaacataacgagacccccatctctaccaaaaatttaaaaattagccgggcatggtggcgcaagcctgttgtcccagttactcctgagactaaggcaagaggatcccttgagtccaggagttcaaggctgcagtgagctatgattgagccactgcactccagcctgggtgacagagcaagactcttatctacctgtgggaaaaaaaaaagaaaaaagtttaatagatcctgaagagttggccgggcgcggtagctcacgcctgtaatcccagcactttgggaggatgagacgggtggataacgaggtcaggagttcgagaccagctgggccaacatggtgaaaccccatttctactgaaattacaaaaattagccgggcgtggtggcgggcgcctgtaatcctagctactcaggaggcggaggcaggagaatcacttgaacccggaaggcagaggttgcagtgagccgagatggcaccattgcactccagcccgggcgaaagagcaaaaactccgtctcaaaaaaaaacaaagatcccgaagagtcagtcgttcatccaagaagccctgactgagctcttattctgtgccagactctgttctaggtgctatggatggagcagggaccaggacctacaaacacgtggagcgcattctaatatctgtgatactctgcaaaactgttaaaacaaatccttgcggccgggcgcggtggctcacgcctgtaattccagcactttggaaggccgagacgggcggatcacgaggtcaggagatcgagaccatcctggctaacacagtgaaaccccgtctttactaaaaatacaaggaaattagccaggcgtggtggcgggtgcctgtagtcccagctactcgggaggctgaggcaggagaatggcgtgaacctgggaggcggagcttgcagtgagccgagatcgcgacactgcactccagcctgggcaacagagcgagactccgtctcaaaacaaaacaaaacaaaacaaaacaaaaatccttgctaccactggccctaaagcaggaggcatagggctgcgtgtgaggagtagtccattgcatgggcttcctccagtttggctttggatttttgagctctctgaatttgttgtttgtgtcctttgcacagtgtccctcccaggttgcacccatgcctgcccctcagggtcccccactcccagtgaatttcacaccatgcagcatgtactttaagccatacatcttacgtatgttccagacatttggtaaaacgccgtttatgtgtttttcagtgactcacaaacattttatttacgtaaatgaggaatgtactcaggcacccttcgtgataccttgccctcagcaggcactcaacagcaataataactttcattccttttgtgcttctcttaacagttcgtgtttagtaggagcacagtagctgtttggggaacgaccttaagtgaatagatgtctgaaatgctgtgtgaagtggggcgcttaataggtggtgagatggttttagaaccagggttttccctctttgcttcttgactccttaaccagttttcattaggagacccctttggaggtttgcagtcagtcagagttgagtgcctactgagtgtactgaattatgaaatgagcacagttcccattaacctgaattttttgctcccaagtaagtcttgatttctgatttatgactgctttttgttgtaccccaatagtcgtctaagaaaggtgattattttgagaggcctggggagacacacatgctcattctcgagggtggcggtggtgcagagggcagagccatgctcgttcttgctatcctgagattggttgctatctgtttcctttgctgctgtgtttttttctgtcagtattaaaggtggaagaaggtccatatctttttctgtgggtgcttcaagtgttgttggaagtggaggcagcagtgacaaggggaagctttccctgcaggatgtagctgagctgattcgggccagagcctgccagagggtggtggtcatggtgggggccggcatcagcacacccagtggcattccagacttcaggtactgcccacagtcccacctgccttctgcgctcccctcccctgactcctgccctccccactgcccagtttattccacttccctgtcctcttccaaaggcctcagagcctttcttctctccctgcagatcgccggggagtggcctgtacagcaacctccagcagtacgatctcccgtaccccgaggccatttttgaactcccattcttctttcacaaccccaagccctttttcactttggccaaggagctgtaccctggaaactacaagcccaacgtcactcactactttctccggctgcttcatgacaaggggctgcttctgcggctctacacgcagaacatcgatgggcttgagagaggtgagccctctgtgagtcgcacacattctttttctcccacggaggctcgggtgcctgtttctcccagggaggctcgggtgcctgtttctcacaggggatgctcgggtgcctgtttctggggacggccaaaacctatcgcttatgcttcttccttgggactttttttgagccaactagttagggctttgttcccaaggaaaatgtcctctgggtgtttaaaggccactgcttgttctcctgcatacctgcagagctgtgtattttgggcagaagttgacattgttttgccaatctggtgtgatgatctctttttttcttctctcttttaagaagtgtattatggaatttttttgagcacacacaaagagagcaatgtaacgaaccgtcctgtcctcatcaccagcacacagccagttcttcctgcgtcctcaccaccttcttccaaatccccagattattttgaagcaaatctctcacatcatgaatttaatctagaaataatctataaacacatgaatggatagctctagagaatactttaaaaacaactccggccgggtgccggattacaggtgtgggatcacacctgtaatcccagcattttgggaggccgaggcaggtagatcacctgaggtcgggagttcgagaccagcctggccaacgtggcaaaaccccgtctctactaaaaatacaaaaaattagccaggcgtggtggtgtgtgcctgtaatcccaggtactcgggaggctgagacaggagaatctcttgaacccagcaggcggaggttgcagtgagccgagatcgtgccacttcactccagcctgggcgacagagggagattctgtctcaaaaaaataaataaaaataaaaataattaaaaaataaaaacaactctgatagtgattcacactgaagaatcactagtaattccttaatatggtcacacttagtctgtggtgatttcttgaccgtatccatatggtgcccaaaccagcgattcacaggttgtgccaacttctggccgtgcacctaacggaagcacttggtggggccttttccttacgtgcagtgatgcagacaggtgctgggacagtcagctctccgggagccaggctcccggagagactgctgatgtgttgtcagttaaaaagaggtggcaccttggctccaggaatgtgtttccttgccagaaggatcccctgacttggaaccacagaggcagcagcggatgccccatgttggtgggctcttctcccagaggtgcagcagggcaggccttgtgggaaggtgggagctcctggctgtgagattcagcactgctgagttagggcagcgacagggacttgggaagcctcctgcagctgggaccctggctgtgccaccgcagcctttcagaaccagttaatactaacacaactttcataagaagtcactttttgtctgtttctaccaagcaattcttttggaatttatgatatttatatcctcattttaacttggtatctgtagaatagaagatatgttcctggatattagatataaatttttgagacagggtcttggctctgttgcccaggctagagtgcagtggcatgatcatagctcactatagcctgaactcttgggccgaagtgatccttttgcctcagcctctggaatagctgggactacgggcatgcactaccatgcctggctaattaaaaaaattttttaagacaagtctcactatgttgctgaggctggtctcaaactcctggcctcaagtgatcctcctgccttggccttccaaagcactgggattacaggcatgagccactgcacccagcctggtattaggtgtaatttttttttttttttttgagacagaatctcgctctcttacccaaactggagtgcggtggcacgacctcagctcactgcaacttccacctcccgggttcaagcgattctcctgtctcagcctccccgagtagctggcactacaggtgcctgccaccacatctggctaatttttgtatttttagtagaggtacggtttcaccatgatggccaggccggtcttgaactcctagcctcaaatgatctgcccacctcggcctcccaaagtgctgggattacaggtgtgggccactgtgcccggctggatataattttatttgagcttttatcaaatggtttttcgtactgagttttgacaggctttgttttaaccgtgatttggctccagctaggtgcccctttgctcccctgccttattctggttgatggcgcatgtaggtgatacgggcatgaaaaccaggcttgaggacatcacaaccccaaggggctgtgcctccttccaggagtcctgccaagcccagaagttgtgctcttggccttgcgtgctcatctcggaggcggcagcaacacttcgctttggcttgaatttcagtgtcgggcatccctgcctcaaagctggttgaagctcatggaacctttgcctctgccacctgcacagtctgccaaagacccttcccaggggaggacattcgggtgagttatcctgctgttggttgtccttctgcagtttgctgttggggtgatctggaaaagtggtattttataagcattgtctcgaaaggacagttgaacaataatagtgtgaaacattttatttgtaaattagaaaatcaatacatgcttgtaaaaaaatttaagacaatatagaaatatgtagggaaaatgaatctcccttcagccaattccagctgcccactttttttttttttttttgagattgagtctcactctgtcgcccaggctggagtgcagtgggcgatctcggctcactgcaacctccgtctcccggattcaaggaattcttctgcctcagcctcctaagtagctgggattacaggcgtgagccaccacgcccggcaatcagatggccttttgtgccgagcttatttcctgaaaatgtttctcgctccttcgccttgtagcttgtgttagtatttcatcctgtttcatggctaaatgttccactgatgtatgcaccacagttggtttgtttgtacatggatgggtgtttgggttgtcccacctttctgctcttgtgtatagttctgctgtggagcatatgcaagtattcgtttgagagtccttgttttttattcttttgagtatgatacctacaagtattgctgggtaactccacgtttagctatatttatttatttattttttgagacacagtcttacactgtcacccaggctggagtgcaatggcgcgatttcggctcaatacaacctctgcctcccgggttcaagcgattctcctgcctcagcctcctgagaagctgggattacaggtgcctgccaccatgcccagctaatgttttttgtatttctagtagagatggggtttcaccatgttggccaggctgctcttgcattcctgacctcaggtggttcacccgcctcggcctcccaaagtgctaagattacaggcgtgagccaccatgccctgcccatgtttaacttttttgtttgtttgttttgagacggagtctagctcttatcaccaggctggagtgcagtggcgcaatctcggctcactgtaccatccgcctcctgggttcaagcgattctcctgcctcagcttcctgagtagctgggactacaggcacacaccaccacgcccggctaatttttgtatttagtagagtagtttcaccatgttggccaggatgtctcgatctcttgacctcgtgatccgcctgcctctttctcccaaagtgtgggattacaggcgagagccactgcgcccggcccgttttaactttttgaggaacgaatatactgttatctgcagaagctggaccattttacattccaccaacagtgggcaagggtttcatcttttccacatcccaacacttactttccattttttaattacagctatcccagtgggtgggaggtggtaacccactgtagcactgattggcattttcctaatgattcatgatatcaaacatctttccatgtgctttttggccatttgtatatctttggagattgaagtcctttgcgcattgtttaattgtgttgtcttttttattgttaagagagtcctttatatattctggaagctagatccttatcagagacatgatttgcaaatattttctgtcattctgtaggttgtcttttttactttgttgatgtcttttgatgcatagaagttttgattttgatgaaatctagtttgtctatttattttctcactcttttggaatcatatctgagaaatggtattgttttactcctgttttcttataagagttttatagtttaaagcttttacatttagttctttgatccattttgagttaatttttgtgtgcgctgtaaggtagggatccagcttcattttcttttatgtggatatgtaattgttccagcaccatttgtttaaaaaaactgtggtcttggcattgttgttgaaaatcagttggccataggtgtatgggttatttctagagtctcaattctattccattgttatctgtatatccttgtgcctgcactataatgttttggttactgtagctttgtagtaagttttgaaattaggaagtgtgagtccagcacatagtagaaacttgatatatacgtattattgttttggtcaactcattcattgaatgaccaatttattcaacaaatagtttagtctcctcagtgccaggccctttgctgggttctgtggatgtgaatagaaattaaaataaggtggagtcatccaacagttacaactgggtgccatacgaattttactataaatatgtactggacactacactgactcagctgtaggaacagagtaggctgggaagcacctttgagatgaggccgtctggatgtaagagtctgtttctggcagcagagacctggagtgtgggaggcctgcttgctctgttagggtttgaactgtatcctgacgatcatgggaggcattggaggatttttaggcaggaaaatgatgtgaagggatttgcatttaaaagagattatttgggactgggcacagtggctcacgcctgtaattccagcactttgggaggcctagacaggcgggtcacctgaggtgggaagcttgagagcagcctgccaaaatggtgaaatcccatctctactaaaaatacaaaaattagccaggtgtggtggtgcacctgtaatcccagctactcaggaggctgaggcagaagaattgcttgaacctgggaggggaggttgctgtgagctgagatcgcaccactgcactccagcctgggtgacagagtgagactccatctcaaaacaaaataaataaataaataagagaataaaatagataatttgggcaacaggttgatgttaattccccacctttgttcttctccttcagtactgtgttggctggtctgaatcttttggcttttcatataaatttctgaaactgttgctatctgttctctgcctgttttatttttgttgttgttgtttggattttttgtttttttgagatagagtcttgctctgttgcccaggctggagtgcagtggtatgatctcagctcattgcaacctccccctctcaggttcaagcgattctcttgcctcatcctcctgagtagctgggattgcaggcatgcgccaccatgcccagctaatttttgtatttttagtagagatggggtttcactatgttggtgaggctggtgtcgaactcctgacctcatgatccacccgcctcggcctcccaaagtgctgggatgacaggcatgagccaccgtgtctggcctctctgcctgttttttaagacttttgtctttggagttttgcggtttctccactgtggttttccatatgaattttcttttatttcttctgcttaaaatttgtaggccagttggtcatggtggctcacgcccgtaatcccagtactttgggaggccgggtgggtggatcgcctgaggtcaggagtttgagaccagcctgaccaacatggagaaaccccatatctactaaaaatacaaaattagccgggcgtgatggtgcatgcctataatctcagatactcgggaggctgaggcaggcgaattgcttgaaccagggaggcggaggttgcggtgagctgagattaggccattgcactccagcctgggaaacaagagcgaaactccatctcaaaaaaaaaaaaataataataataattgtaggccttccttaagaaaaataaaataaaattctaggctgggcgcggtggctcctgcctgtaatcccagtactttgggaagctgaggcgggtggatcacctgagttaggagtttgagaccagcctggccaacatggtgaaaccccgtctctactaaaaatacaaagatgagccatttgtggtggcacccatctgtaatcccagctactcgggaggctgaggcaggagaattgctggaacccaggaggcagaagttgtagtgaaccgagatcatgccactgcactccagcctgggtgacagagcgagatgccatctcaaaaaaataaaatataaaataaaattctaagccctgcaaccaactgaatggagccctccccttggtcaagggaaccccagagaaaccttggaagcttgagttcctggccgtagcaggagaggaggtcagacgcgcctcactgtacccctccctccccagccaccattaggcttcttcactaagggctaaacagaaaccagcccttttcaaagactctacactgctaatgtggattactggtttatcttcccagatacagattaaagacaagatgagattaatggttccttcacccttccctgagaggtctgcttagttctcttcctctgtttccttctatcttaggtaaaatgtacatttactgggcacttactgaagtctcacaagtacgtaaccactcacctcacagccaccctccctctttgaaggaccacatgtaattactaaacctcctgagaacctcttgggacagaaacaagcacagatgtgccgtgactcatgtttttcctgtgggcaccctcaggctggctcagtagccctcacttgcttgagatcctgaatctgcgggttggcgtctttcatggttgctggatcatactctgccgttatctcttcggatatgagttgcccctagcccactatctggcccctctctttagggacctctgattgaacatacattagaccttctctctcctgctgttcctgatcactcttctgtcctgtaattgctgcttcttgtgctgcattctgggtaatttcttctggtcttttttccagtttactaatattgtattctgttataaggtccttccattgagtgtttctttctttcttttttcccaaacagcaactcaaaacagacattgagttttaattttggttcctgtactttttatttctagaagttctatttggttatttttcaagtctgctacattattacataattttttaataattttatatctttaatagatagttttttgttttgttttgttttgttttgttttttgagacagagtctcgctttgttgcccaggctggagtgcagtggtgcaatctcagctcacagcaacctccgcctcccaggttcaagtgattcccctgcctcagcctcccaagtagctgggattacaggcacgcatcaccacgcctggctaattttttgtgttttagtagagacagggtttcaccatgttggccaagacagtctcgatctcctgacctcgtgatctgcccacctcggcctcccgaagtcctgggattacagagctgagccactgcgcctggcctttgatagatatttcaagttcatcttttttttttgcttccttaatttttttttttgctataccccatgcctccaagataacagttttttctttttaatttaaatataatacagttttactgtgtatccaagaatatctgaaatctttcgtgggtctctttcttttgtcttttgtatctgttgctttttgctgggctgagcctgcttaaaacaagccccgttagctgtaaaggtttaccttagaaagtcaggtgtcttcctctgtaactctctcccttttccatctgctccaaggcatttatttatattaatcttgacgcaaagggaagttgtgtccacttcaccttggccagtaaggaagcagtgtttggcagatgttgttactcctaataatgccagccagtgagtgaagctgacctgaatgcctcccagggctgaggcaatggcatgatcaccgaagctcaaaccagagacagtttcacctttctgactgaatagtgttcggtgtaggccaaatgcctgcagactactgtttgaggactggtgtggtctaccaggtgtttccttagcgcctggatgtctctggctgccatcccagggatagagcatggtgttagatacgctagatgcctgccgaagtaattatgggtgaaacatatgatgtccaagatttgcttttaaaggctccaatacctcctcccagattccggagggctgtgaaacaattagctatgaaaactggtaattcctgaagctgggtacatgggggttcatgatccctctctcaccttttttgggggagaatgtttgagactttaataagaacttgttgccttttccttttacagggtgttgcaggcatcttcctcaggcctgttttctctgttttccaggctgacgtgatggcagacagggttccccgctgcccggtctgcaccggcgttgtgaagcccgacattgtgttctttggggagccgctgccccagaggttcttgctgcatgtggttgatttccccatggcagatctgctgctcatccttgggacctccctggaggtttgtcagcaggcctgtgcagggaggaggctggagggcaggggaagggaggggtacaggagtcatctcatgggctgtcggcaggcctgtgcagggaggagtctggagggcaggggaagggaggggtacaggagtcacctcatgggctgtcggcaggcctgtgcagggaggaggctggagggcaggggaagggaggggtacaggagtcatctcatgggctgtcggcaggcctgtgcagggaggaggctggagggcaggggaagggaggggtacaggagtcatctcatgggcccttccagggctggtgccactttgggaaggtgaatggattcagctggggttccaggctgagggagcagcagcctgtgcaggagacaggaaggtgggaagctgctgggctttggaggtggtataggtgtgggtggggcaccacgtgtgaggagaagggagaaggatgggggtgtgggggcgaggtggaggggcagggcctcccaggtcagatcaggaatactgatgctgcagtgggaggagtgataaatccacagggactggcccggggacgtagctgcacccttggggtcagggaggcctttggggagtggagagtggagcaagcagtgccaggaggctggtcctggagaaggtggagctgtggtcgcctgagggatggcgaggagggggactggactcgcagtctgtgatgttttggggacgtgagaaggaggcgtctggcttggtctgtaaggtcagggcacttgctggtgaggcgtgatttgggagggaggatgcccagctcggttctgtgtgtgtctgaggtgtcgggaaacatgccctggatgtgttcaagcagctgttctgcgtctgcgtctgcagctcaggaaattcctaaaagctgtgatgagagcaagaaatgagaccatgaagtcagtgtgtgcgtgactggatgtaggcaccgaggacagaagggccagaaagacctgtgctcagaggggcccagggcagccacaggggcccagagcatgtgtttgttcaggcattcattgtgtgctgggccctgctccagtgctttggacatacacggtcagatgtcagtgtaagaagttatatagtttgttaggagatgattgatgttatgagaaagataacaagtaggatagaaaggctagaagggttgggaaccagctgcagtgtcaagtcaggcaggtggagttggatctaagagtttaccgaggtgaggagggtctggcaggggacactgcacaggtgacaagcagcaaggagggtggggcgaagtcagcattgatggccacggggctggagcagagaagaaggtggggcacaagtgtcatctcatgggaggctggcgccacctcagaaggtgaatgggttcagcttgggttccaggccagagtctgaagttgagaggactccgttgggtgctgggctgtgagcccaccatgggggcaagactgggagcagcagacccagcagggcccttgtaggtaatcaccggctggcactggctgggggccaggtaaagccagcagaggctgaggggtgctggagtctgggtgtgtgtgaacgcagagtgggtacgctggcacagtgcatgggaggccgtggattcccaaggaccccagggctgtggctggagcagctggaaagacggagccgccgcttcctgagatggagaagcctggtaggtgggtttgggggagctcaggaactcagccttgtttccacggatttgaggatgtgctgcggactggaggtgttgagcaggtggacatgagtctggagtccaggaaggcccagaggcaggagctggggtgctggagtgagcagacaggagagcccagggtgtggacagacatgagaatgccatgctaggcctaggatggagggacagacacaggaggagcagtcagaggggccatggtggtcagcacagtgtgggctgagaccagctgaccgtgctggccaccaggtgtggacacttgggccaccagccatctttattgttgaagtgaaatgaaaatggcctttttcctgattataagtgtatcatgtgtgtctttgaaaagattcgtacattatataaagatataaagcaaaggatcaactttttaatcccaccaactgttagcattttattctgtgtcctctcagctttcttttttttgtacaaatgcatacgtacagatggtaattttaaactaaaagttggacagcactgtacattctattctgcagcctgctgttttcacgtaacaatgtgagtccatggagatgtgctgcgttgttaatgccaacagtttcccttacacggatatgaggtcccaactgagaaacccatgtctgtaaggctggtgccatcatgaactgaatgagctggtgtcacgcacagactctatctcatgtgctttgtggacgaaatgttaatgtgtttgactgtggagtaccactccagatcccctttaggtgtgacataacgtgggatgtaaaccatatgatcttttctaaaatctcaaaaattctgaaacatattcagccacaagagctttaacatagattttgtggatttaatacaaaatttatgtaagcaatttcttactgatggacaatgataataaatagtatataatttttacattaaaagtaatgctgggccaggcaccgtggctcacacctgttatcccagcactctgggaggccaaggcaggaagattgcctgaagctaggcatttgagaccagcctgggcagtatagtcagacctcgtctctacaaaaaataaaaagatagccaggcatggtctgtgtagttgcagctatttgagaggctgaggaaggaggattgcttgagcccaggaatttgaggttatagtgaactatgatcatgccactgcattccagcctgggtaacagaatgagatcccgtgctgtagtgaatatccctgtgtatcatccttatctactcatgcaagtactcctgaagggtaaatgctgtagtgaatatccctgtgtatcatccttatctacccatgcaagtactctggaagggtaaatgctgataaatactgagaacttgccttccggtgaatatccctgtgtgtcatccttatctacccatgcaagtactcctgaagggtaaatgctgtagtgaatatccctgtgtatcatccttatctacccatgcaagtactctggaagggtaaatgctgataaatactgagaacttgccttccggtgaatatccctgtgtgtcatccttatctacccatgcaagtactcctgaagggtaaatgctgtggtgaatatccctgtgtatcatccttatctacccatgcaagaactcctgaagggtaaatgctgataaatattgagaacttgccttccagaaagatgtaacaattacactgccacaaactgtgtttttatgtagccattttatcacatcctcaccaaaaccaaaatcacacaaatcaaattggttaaaaaatgcatgtgtgtgtgtggaggggggtgcggattttgcctttctgtagtaaagaatgaagttcatcttttcatgtttattgccagttgtgtttcttctctttggattgtatatttgtacctcttgaccatttttcattgggtcattataaattagcaatataaattagttttaattttagtataaattaaataatataattacattttaatgttaatataaacttctttcttttttttttttttttttttgagacagagtcttgctctgtctcccaggctggaggttcagtggcgcgatctcggctcactgcaacctccacctcccaggctcaagccattctcctgcctcaacctcccgagtagctcggattataggtgcgtgccaccacgcccagctaagttttgtatttttagtagagacgtggtttcactatgttggccaggctggtcttgaactcctgacctcagctgatctgcccgcctcggcctcccaaagtgctgggattataggtgtgaaccaccatgcccagctgttaatataaatttcattataaattagcattataaattagttcataaattatatgtttataaatgagtttatcaattagcaatataaactattgtcatatgttgtaaatatttttgcagtttatgatgatgagaggtttttaaaaattttaaattttctacatagtagttttatgtagataccgagataatagtatttacatagtcagatctgtcattttcctttgccttatctgacttcagtttttacgcctagaacgttcttccctatccttacttgtaaatccttagttttcttcaagaactgttttgtttacattgaaacctttaatccatttgaatttttttcagtgggaggtaggaatggagtattttcctcccagataatgagccagttttaatgccatttattaatgtatccatttttttaccttgttcctcttaaaagaagctttgagagctgtatgaagaagcctgatggcaccgagctaggcctctctagaggctgggtggggaagaccatggagagacgtaacagtaactcctgctcgggggcaccagctcgtctgggtgcccgatgctggtggtggctgtcagagcaagcagggctagccagaggagatggacgagtctgtgctgttgtccctctgcgtcatgctgggagacagcgaggtggggaggacagggagaacagaacgtgctcacaaagaggaggcaggaaggttggatccctgatgagccttggaacggaggtggggaaaagcaaggatgtgtggaaacagcaagaagtgggagagagagagagaggcggaggggagaaaaccgtcacggaggccaagcggcaggagctcagctgaagaaatgagattggtggtgggttttccctatatcgcaggctctgactgccaatctgctgctcctccaaggcctcggtggctgtggcatgaaacatcctgaggagcttgtaaagtggacactgtgcccctcacgtttggcccatttttcaggtggagccttttgccagcttgaccgaggccgtgcggagctcagttccccgactgctcatcaaccgggacttggtggggcccttggcttggcatcctcgcagcagggacgtggcccagctgggggacgtggttcacggcgtggaaagcctagtggagcttctgggctggacagaagagatgcgggaccttgtgcagcgggaaactgggaaggtacagactgctgaggaggaccatccaaggggctgcccttctcactgctctagggtatggtccacctgatatggagccccgttggttaacacagtaacagtaatagctgatgatgctgtgaatcctgcaccaggcactacctggacctgactgggtgttactttcaatacctccatttagagatgaggaaacagatgctaacaggccaagcagggacacggtccagacactcagggctgatgagtctgtattcttaacagactataggcgttaccttcactccctaaaataaagcagccaacagtgtccctctaaggcctggtatgtgattctaagatgatacgggttaaagaactttgagaagctaaagttctctgcatctatgtgggatgaaggctacatgagtgatgcttttcggaagtaattggtatgagagccattgatcaattataatccgctgaggaaagccaaagagccttgatgctttctaagagatttcaaaccgcctataaacaagtgaagttacagaaaatgcagtttcccataagaatcatgtagcatgtgtagccttgatattaagggttttcaatgggaggtggtagcattaagcatttaaagtccagtgtcatgattacaggcaggtgtaacactgtccaaaggggatttcaccagtgtattagtctgttctctggctgctcataaaggcatacctgagactgggtaatttataaaggaaagaggtttaatggactcacagttccatatggctgtgggggcctcacaatcatagtggaaggcaaagcaggagcaaagtactgtcttacaaggtggcaggcaagaggacgtgtgcgggggaactgccctttataaaactatcagatcttgtgagacttattcactatcagaagaagagtgtgggaaagacccgcccccatgattcagttacttccacttggccccacccttgacacatggggatgattacaattcaaggtgagatttgggtggggacacagccaaaccatatcaactacaatatatcacagttgatgctcctcttgccttccaaggcagatgtcttaggaaatcctgatcctttttccttgtccacagctgtggctgcctcatggctcagggccatggggtcagcactctcctcacctccaccagtccaagacctccaacctctggttgcaggctgattttttaccaatcatggtcacttcattatggaggcagggaacccagctaacaatgaggcttaaacgctgagaggcgagtgcctcctggccagctcacaaggcagcggagatcttagatcagcccagcaggcttttttgagggatccttttcctgctccaacttcatattttcttttttttgtaatggagtttcactcttgttgcccaagctggagtgcaatggcacgattttggctcactgcagccctgcctcctgggttcaagtgattctcctgcctcagcctcctgagcagctgggattacaggcatgtgccaccatgcctggctaatttctgtacttttattagagatgggatttcatcatgttagtcaggctggtctcaaactcctgacctcgggtgatccacctgcctcagcctcccaaagtgctgggattataggcatgagccagcaggcccggcccaacttcctgttttcatagaaaagcagattgtaactctggtagctcctgtggagttttggaagtggcttaataggatttgaactgtataatctagtttcagagaaatgtatgtaaaatgggttatgatttcattttctgttttttacagcattactatccaaggggttacttttccaaatagtgaatgcttttaagcacatgagcatcagtacatattgatttgggtactttaagacccatagaatgaggctctccatttagccaccctgttctgcccaggcctgctgggatcctcttagcccagcacagcagcagcagtatttgcagaaagcagcttgttttgtgaaatattttgcatgtctgcagctagagctgtttgaacagagatctgctggcctgcctgggtgtgtaaacagatagctgataccctctgtcttctgtattccagcttgatggaccagacaaataggatgatggctgcccccacacaataaatggtaacataggagacatccacatcccaattctgacaagacctcatgcctgaagacagcttgggcaggtgaaaccagaatatgtgaactgagtggacacccgaggctgccactggaatgtcttctcaggccatgagctgcagtgactggtagggctgtgtttacagtcagggccaccccgtcacatatacaaaggagctgcctgcctgtttgctgtgttgaactcttcactctgctgaagctcctaatggaaaaagctttcttctgactgtgaccctcttgaactgaatcagaccaactggaatcccagaccgagtctgctttctgtgcctagttgaacggcaagctcggcatctgttggttacaagatccagacttgggccgagcggtccccagccctcttcatgttccgaagtgtagtcttgaggccctggtgccgcacttctagcatgttggtctcctttagtggggctatttttaatgagagaaaatctgttctttccagcatgaaatacatttagtctcctc

SEQ ID NO: 14001 - DNA, 2627 bp, Homo sapiens
gcgcggaacatggcgttctggggttggcgcgccgcggcagccctccggctgtggggccgggtagttgaacgggtcgaggccgggggaggcgtggggccgtttcaggcctgcggctgtcggctggtgcttggcggcagggacgatgctgacgtgatggcagacagggttccccgctgcccggtctgcaccggcgttgtgaagcccgacattgtgttctttggggagccgctgccccagaggttcttgctgcatgtggttgatttccccatggcagatctgctgctcatccttgggacctccctggaggtttgtcagcaggcctgtgcagggaggaggctggagggcaggggaagggaggggtacaggagtcatctcatgggcccttccagggctggtgccactttgggaaggtgaatggattcagctggggttccaggctgagggagcagcagcctgtgcaggagacaggaaggtgggaagctgctgggctttggaggtggtataggtgtgggtggggcaccacgtgtgaggagaagggagaaggatgggggtgtgggggcgaggtggaggggcagggcctcccaggtcagatcaggaatactgatgctgcagtgggaggagtgataaatccacagggactggcccggggacgtagctgcacccttggggtcagggaggcctttggggagtggagagtggagcaagcagtgccaggaggctggtcctggagaaggtggagctgtggtcgcctgagggatggcgaggagggggactggactcgcagtctgtgatgttttggggacgtgagaaggaggcgtctggcttggtctgtaaggtcagggcacttgctggtgaggcgtgatttgggagggaggatgcccagctcggttctgtgtgtgtctgaggtgtcgggaaacatgccctggatgtgttcaagcagctgttctgcgtctgcgtctgcagctcaggaaattcctaaaagctgtgatgagagcaagaaatgagaccatgaagtcagtgtgtgcgtgactggatgtaggcaccgaggacagaagggccagaaagacctgtgctcagaggggcccagggcagccacaggggcccagagcatgtgtttgttcaggcattcattgtgtgctgggccctgctccagtgctttggacatacacggtcagatgtcagtgtaagaagttatatagtttgttaggagatgattgatgttatgagaaagataacaagtaggatagaaaggctagaagggttgggaaccagctgcagtgtcaagtcaggcaggtggagttggatctaagagtttaccgaggtgaggagggtctggcaggggacactgcacaggtgacaagcagcaaggagggtggggcgaagtcagcattgatggccacggggctggagcagagaagaaggtggggcacaagtgtcatctcatgggaggctggcgccacctcagaaggtgaatgggttcagcttgggttccaggccagagtctgaagttgagaggactccgttgggtgctgggctgtgagcccaccatgggggcaagactgggagcagcagacccagcagggcccttgtaggtaatcaccggctggcactggctgggggccaggtaaagccagcagaggctgaggggtgctggagtctgggtgtgtgtgaacgcagagtgggtacgctggcacagtgcatgggaggccgtggattcccaaggaccccagggctgtggctggagcagctggaaagacggagccgccgcttcctgagatggagaagcctggtggagccttttgccagcttgaccgaggccgtgcggagctcagttccccgactgctcatcaaccgggacttggtggggcccttggcttggcatcctcgcagcagggacgtggcccagctgggggacgtggttcacggcgtggaaagcctagtggagcttctgggctggacagaagagatgcgggaccttgtgcagcgggaaactgggaaggtacagactgctgaggaggaccatccaaggggctgcccttctcactgctctaggcttgatggaccagacaaataggatgatggctgcccccacacaataaatggtaacataggagacatccacatcccaattctgacaagacctcatgcctgaagacagcttgggcaggtgaaaccagaatatgtgaactgagtggacacccgaggctgccactggaatgtcttctcaggccatgagctgcagtgactggtagggctgtgtttacagtcagggccaccccgtcacatatacaaaggagctgcctgcctgtttgctgtgttgaactcttcactctgctgaagctcctaatggaaaaagctttcttctgactgtgaccctcttgaactgaatcagaccaactggaatcccagaccgagtctgctttctgtgcctagttgaacggcaagctcggcatctgttggttacaagatccagacttgggccgagcggtccccagccctcttcatgttccgaagtgtagtcttgaggccctggtgccgcacttctagcatgttggtctcctttagtggggctatttttaatgagagaaaatctgttctttccagcatgaaatacatttagtctcctc

SEQ ID NO: 14002 - DNA, 5743 bp, Homo sapiens
cttggactgcgcggaacatggcgttctggggttggcgcgccgcggcagccctccggctgtggggccgggtagttgaacgggtcgaggccgggggaggcgtggggccgtttcaggcctgcggctgtcggctggtgcttggcggcagggacgatgtgagtgcggggctgagaggcagccatggggcccgcggtgagcccttggacccggcgcgccccttgcagaggcctcccagacccgaggtgcccagggcattccggaggcagccgagggcagcagctcccagtttcttcttttcgaggtattttgggcaaggacaagcacttcttgcgtgttcgttgtcgacacctcgcccactctttctcaccttgccgtgtttcctttgcggcatgtctgggagtttacgtgcgttccaacaccggggcctccgtctttatgctgatctgtggacgtcacttatgggggttttgtcgtttatttcaccattccctcattgaaatacgttctaacctttagttattgtgcatcatgctgtggtgaataaccttgttggcacctcactgtttgcataaattcctagtactgggattgctaggtccaaaagtatatgcatttaacgctttaatgatccctcataaatgttgtgcggttaatactcccactggcatgtgatcgtacccgtctccatagtaattgcatctaagaactgaggctacataggaaaaaatcttaaggtccatggttgttaggtatcagatgccctataatggatgaatatttaagtaaataatggcacattgacttgctgtctgacacaactgctgaaaatgttggtgaaaagtgagtctcgaagtggtagctcacacttgtaataccagcactttcggaggctgagacggggatcgctcgaggccaggagttcaagagcagcctgggcaacataacgagacccccatctctaccaaaaatttaaaaattagccgggcatggtggcgcaagcctgttgtcccagttactcctgagactaaggcaagaggatcccttgagtccaggagttcaaggctgcagtgagctatgattgagccactgcactccagcctgggtgacagagcaagactcttatctacctgtgggaaaaaaaaaagaaaaaagtttaatagatcctgaagagttggccgggcgcggtagctcacgcctgtaatcccagcactttgggaggatgagacgggtggataacgaggtcaggagttcgagaccagctgggccaacatggtgaaaccccatttctactgaaattacaaaaattagccgggcgtggtggcgggcgcctgtaatcctagctactcaggaggcggaggcaggagaatcacttgaacccggaaggcagaggttgcagtgagccgagatggcaccattgcactccagcccgggcgaaagagcaaaaactccgtctcaaaaaaaaacaaagatcccgaagagtcagtcgttcatccaagaagccctgactgagctcttattctgtgccagactctgttctaggtgctatggatggagcagggaccaggacctacaaacacgtggagcgcattctaatatctgtgatactctgcaaaactgttaaaacaaatccttgcggccgggcgcggtggctcacgcctgtaattccagcactttggaaggccgagacgggcggatcacgaggtcaggagatcgagaccatcctggctaacacagtgaaaccccgtctttactaaaaatacaaggaaattagccaggcgtggtggcgggtgcctgtagtcccagctactcgggaggctgaggcaggagaatggcgtgaacctgggaggcggagcttgcagtgagccgagatcgcgacactgcactccagcctgggcaacagagcgagactccgtctcaaaacaaaacaaaacaaaacaaaacaaaaatccttgctaccactggccctaaagcaggaggcatagggctgcgtgtgaggagtagtccattgcatgggcttcctccagtttggctttggatttttgagctctctgaatttgttgtttgtgtcctttgcacagtgtccctcccaggttgcacccatgcctgcccctcagggtcccccactcccagtgaatttcacaccatgcagcatgtactttaagccatacatcttacgtatgttccagacatttggtaaaacgccgtttatgtgtttttcagtgactcacaaacattttatttacgtaaatgaggaatgtactcaggcacccttcgtgataccttgccctcagcaggcactcaacagcaataataactttcattccttttgtgcttctcttaacagttcgtgtttagtaggagcacagtagctgtttggggaacgaccttaagtgaatagatgtctgaaatgctgtgtgaagtggggcgcttaataggtggtgagatggttttagaaccagggttttccctctttgcttcttgactccttaaccagttttcattaggagacccctttggaggtttgcagtcagtcagagttgagtgcctactgagtgtactgaattatgaaatgagcacagttcccattaacctgaattttttgctcccaagtaagtcttgatttctgatttatgactgctttttgttgtaccccaatagtcgtctaagaaaggtgattattttgagaggcctggggagacacacatgctcattctcgagggtggcggtggtgcagagggcagagccatgctcgttcttgctatcctgagattggttgctatctgtttcctttgctgctgtgtttttttctgtcagtattaaaggtggaagaaggtccatatctttttctgtgggtgcttcaagtgttgttggaagtggaggcagcagtgacaaggggaagctttccctgcaggatgtagctgagctgattcgggccagagcctgccagagggtggtggtcatggtgggggccggcatcagcacacccagtggcattccagacttcaggtactgcccacagtcccacctgccttctgcgctcccctcccctgactcctgccctccccactgcccagtttattccacttccctgtcctcttccaaaggcctcagagcctttcttctctccctgcagatcgccggggagtggcctgtacagcaacctccagcagtacgatctcccgtaccccgaggccatttttgaactcccattcttctttcacaaccccaagccctttttcactttggccaaggagctgtaccctggaaactacaagcccaacgtcactcactactttctccggctgcttcatgacaaggggctgcttctgcggctctacacgcagaacatcgatgggcttgagagaggtgagccctctgtgagtcgcacacattctttttctcccacggaggctcgggtgcctgtttctcccagggaggctcgggtgcctgtttctcacaggggatgctcgggtgcctgtttctggggacggccaaaacctatcgcttatgcttcttccttgggactttttttgagccaactagttagggctttgttcccaaggaaaatgtcctctgggtgtttaaaggccactgcttgttctcctgcatacctgcagagctgtgtattttgggcagaagttgacattgttttgccaatctggtgtgatgatctctttttttcttctctcttttaagaagtgtattatggaatttttttgagcacacacaaagagagcaatgtaacgaaccgtcctgtcctcatcaccagcacacagccagttcttcctgcgtcctcaccaccttcttccaaatccccagattattttgaagcaaatctctcacatcatgaatttaatctagaaataatctataaacacatgaatggatagctctagagaatactttaaaaacaactccggccgggtgccggattacaggtgtgggatcacacctgtaatcccagcattttgggaggccgaggcaggtagatcacctgaggtcgggagttcgagaccagcctggccaacgtggcaaaaccccgtctctactaaaaatacaaaaaattagccaggcgtggtggtgtgtgcctgtaatcccaggtactcgggaggctgagacaggagaatctcttgaacccagcaggcggaggttgcagtgagccgagatcgtgccacttcactccagcctgggcgacagagggagattctgtctcaaaaaaataaataaaaataaaaataattaaaaaataaaaacaactctgatagtgattcacactgaagaatcactagtaattccttaatatggtcacacttagtctgtggtgatttcttgaccgtatccatatggtgcccaaaccagcgattcacaggttgtgccaacttctggccgtgcacctaacggaagcacttggtggggccttttccttacgtgcagtgatgcagacaggtgctgggacagtcagctctccgggagccaggctcccggagagactgctgatgtgttgtcagttaaaaagaggtggcaccttggctccaggaatgtgtttccttgccagaaggatcccctgacttggaaccacagaggcagcagcggatgccccatgttggtgggctcttctcccagaggtgcagcagggcaggccttgtgggaaggtgggagctcctggctgtgagattcagcactgctgagttagggcagcgacagggacttgggaagcctcctgcagctgggaccctggctgtgccaccgcagcctttcagaaccagttaatactaacacaactttcataagaagtcactttttgtctgtttctaccaagcaattcttttggaatttatgatatttatatcctcattttaacttggtatctgtagaatagaagatatgttcctggatattagatataaatttttgagacagggtcttggctctgttgcccaggctagagtgcagtggcatgatcatagctcactatagcctgaactcttgggccgaagtgatccttttgcctcagcctctggaatagctgggactacgggcatgcactaccatgcctggctaattaaaaaaattttttaagacaagtctcactatgttgctgaggctggtctcaaactcctggcctcaagtgatcctcctgccttggccttccaaagcactgggattacaggcatgagccactgcacccagcctggtattaggtgtaatttttttttttttttttgagacagaatctcgctctcttacccaaactggagtgcggtggcacgacctcagctcactgcaacttccacctcccgggttcaagcgattctcctgtctcagcctccccgagtagctggcactacaggtgcctgccaccacatctggctaatttttgtatttttagtagaggtacggtttcaccatgatggccaggccggtcttgaactcctagcctcaaatgatctgcccacctcggcctcccaaagtgctgggattacaggtgtgggccactgtgcccggctggatataattttatttgagcttttatcaaatggtttttcgtactgagttttgacaggctttgttttaaccgtgatttggctccagctaggtgcccctttgctcccctgccttattctggttgatggcgcatgtaggtgatacgggcatgaaaaccaggcttgaggacatcacaaccccaaggggctgtgcctccttccaggagtcctgccaagcccagaagttgtgctcttggccttgc

SEQ ID NO: 14003 - DNA, 681 bp, Homo sapiens
cttggactgcgcggaacatggcgttctggggttggcgcgccgcggcagccctccggctgtggggccgggtagttgaacgggtcgaggccgggggaggcgtggggccgtttcaggcctgcggctgtcggctggtgcttggcggcagggacgattattaaaggtggaagaaggtccatatctttttctgtgggtgcttcaagtgttgttggaagtggaggcagcagtgacaaggggaagctttccctgcaggatgtagctgagctgattcgggccagagcctgccagagggtggtggtcatggtgggggccggcatcagcacacccagtggcattccagacttcagatcgccggggagtggcctgtacagcaacctccagcagtacgatctcccgtaccccgaggccatttttgaactcccattcttctttcacaaccccaagccctttttcactttggccaaggagctgtaccctggaaactacaagcccaacgtcactcactactttctccggctgcttcatgacaaggggctgcttctgcggctctacacgcagaacatcgatgggcttgagagaggtgatacgggcatgaaaaccaggcttgaggacatcacaaccccaaggggctgtgcctccttccaggagtcctgccaagcccagaagttgtgctcttggccttgc

SEQ ID NO: 14004 - DNA, 9839 bp, Homo sapiens
tggggcgcttaataggtggtgagatggttttagaaccagggttttccctctttgcttcttgactccttaaccagttttcattaggagacccctttggaggtttgcagtcagtcagagttgagtgcctactgagtgtactgaattatgaaatgagcacagttcccattaacctgaattttttgctcccaagtaagtcttgatttctgatttatgactgctttttgttgtaccccaatagtcgtctaagaaaggtgattattttgagaggcctggggagacacacatgctcattctcgagggtggcggtggtgcagagggcagagccatgctcgttcttgctatcctgagattggttgctatctgtttcctttgctgctgtgtttttttctgtcagtattaaaggtggaagaaggtccatatctttttctgtgggtgcttcaagtgttgttggaagtggaggcagcagtgacaaggggaagctttccctgcaggatgtagctgagctgattcgggccagagcctgccagagggtggtggtcatggtgggggccggcatcagcacacccagtggcattccagacttcaggtactgcccacagtcccacctgccttctgcgctcccctcccctgactcctgccctccccactgcccagtttattccacttccctgtcctcttccaaaggcctcagagcctttcttctctccctgcagatcgccggggagtggcctgtacagcaacctccagcagtacgatctcccgtaccccgaggccatttttgaactcccattcttctttcacaaccccaagccctttttcactttggccaaggagctgtaccctggaaactacaagcccaacgtcactcactactttctccggctgcttcatgacaaggggctgcttctgcggctctacacgcagaacatcgatgggcttgagagaggtgagccctctgtgagtcgcacacattctttttctcccacggaggctcgggtgcctgtttctcccagggaggctcgggtgcctgtttctcacaggggatgctcgggtgcctgtttctggggacggccaaaacctatcgcttatgcttcttccttgggactttttttgagccaactagttagggctttgttcccaaggaaaatgtcctctgggtgtttaaaggccactgcttgttctcctgcatacctgcagagctgtgtattttgggcagaagttgacattgttttgccaatctggtgtgatgatctctttttttcttctctcttttaagaagtgtattatggaatttttttgagcacacacaaagagagcaatgtaacgaaccgtcctgtcctcatcaccagcacacagccagttcttcctgcgtcctcaccaccttcttccaaatccccagattattttgaagcaaatctctcacatcatgaatttaatctagaaataatctataaacacatgaatggatagctctagagaatactttaaaaacaactccggccgggtgccggattacaggtgtgggatcacacctgtaatcccagcattttgggaggccgaggcaggtagatcacctgaggtcgggagttcgagaccagcctggccaacgtggcaaaaccccgtctctactaaaaatacaaaaaattagccaggcgtggtggtgtgtgcctgtaatcccaggtactcgggaggctgagacaggagaatctcttgaacccagcaggcggaggttgcagtgagccgagatcgtgccacttcactccagcctgggcgacagagggagattctgtctcaaaaaaataaataaaaataaaaataattaaaaaataaaaacaactctgatagtgattcacactgaagaatcactagtaattccttaatatggtcacacttagtctgtggtgatttcttgaccgtatccatatggtgcccaaaccagcgattcacaggttgtgccaacttctggccgtgcacctaacggaagcacttggtggggccttttccttacgtgcagtgatgcagacaggtgctgggacagtcagctctccgggagccaggctcccggagagactgctgatgtgttgtcagttaaaaagaggtggcaccttggctccaggaatgtgtttccttgccagaaggatcccctgacttggaaccacagaggcagcagcggatgccccatgttggtgggctcttctcccagaggtgcagcagggcaggccttgtgggaaggtgggagctcctggctgtgagattcagcactgctgagttagggcagcgacagggacttgggaagcctcctgcagctgggaccctggctgtgccaccgcagcctttcagaaccagttaatactaacacaactttcataagaagtcactttttgtctgtttctaccaagcaattcttttggaatttatgatatttatatcctcattttaacttggtatctgtagaatagaagatatgttcctggatattagatataaatttttgagacagggtcttggctctgttgcccaggctagagtgcagtggcatgatcatagctcactatagcctgaactcttgggccgaagtgatccttttgcctcagcctctggaatagctgggactacgggcatgcactaccatgcctggctaattaaaaaaattttttaagacaagtctcactatgttgctgaggctggtctcaaactcctggcctcaagtgatcctcctgccttggccttccaaagcactgggattacaggcatgagccactgcacccagcctggtattaggtgtaatttttttttttttttttgagacagaatctcgctctcttacccaaactggagtgcggtggcacgacctcagctcactgcaacttccacctcccgggttcaagcgattctcctgtctcagcctccccgagtagctggcactacaggtgcctgccaccacatctggctaatttttgtatttttagtagaggtacggtttcaccatgatggccaggccggtcttgaactcctagcctcaaatgatctgcccacctcggcctcccaaagtgctgggattacaggtgtgggccactgtgcccggctggatataattttatttgagcttttatcaaatggtttttcgtactgagttttgacaggctttgttttaaccgtgatttggctccagctaggtgcccctttgctcccctgccttattctggttgatggcgcatgtaggtgatacgggcatgaaaaccaggcttgaggacatcacaaccccaaggggctgtgcctccttccaggagtcctgccaagcccagaagttgtgctcttggccttgcgtgctcatctcggaggcggcagcaacacttcgctttggcttgaatttcagtgtcgggcatccctgcctcaaagctggttgaagctcatggaacctttgcctctgccacctgcacagtctgccaaagacccttcccaggggaggacattcgggtgagttatcctgctgttggttgtccttctgcagtttgctgttggggtgatctggaaaagtggtattttataagcattgtctcgaaaggacagttgaacaataatagtgtgaaacattttatttgtaaattagaaaatcaatacatgcttgtaaaaaaatttaagacaatatagaaatatgtagggaaaatgaatctcccttcagccaattccagctgcccactttttttttttttttttgagattgagtctcactctgtcgcccaggctggagtgcagtgggcgatctcggctcactgcaacctccgtctcccggattcaaggaattcttctgcctcagcctcctaagtagctgggattacaggcgtgagccaccacgcccggcaatcagatggccttttgtgccgagcttatttcctgaaaatgtttctcgctccttcgccttgtagcttgtgttagtatttcatcctgtttcatggctaaatgttccactgatgtatgcaccacagttggtttgtttgtacatggatgggtgtttgggttgtcccacctttctgctcttgtgtatagttctgctgtggagcatatgcaagtattcgtttgagagtccttgttttttattcttttgagtatgatacctacaagtattgctgggtaactccacgtttagctatatttatttatttattttttgagacacagtcttacactgtcacccaggctggagtgcaatggcgcgatttcggctcaatacaacctctgcctcccgggttcaagcgattctcctgcctcagcctcctgagaagctgggattacaggtgcctgccaccatgcccagctaatgttttttgtatttctagtagagatggggtttcaccatgttggccaggctgctcttgcattcctgacctcaggtggttcacccgcctcggcctcccaaagtgctaagattacaggcgtgagccaccatgccctgcccatgtttaacttttttgtttgtttgttttgagacggagtctagctcttatcaccaggctggagtgcagtggcgcaatctcggctcactgtaccatccgcctcctgggttcaagcgattctcctgcctcagcttcctgagtagctgggactacaggcacacaccaccacgcccggctaatttttgtatttagtagagtagtttcaccatgttggccaggatgtctcgatctcttgacctcgtgatccgcctgcctctttctcccaaagtgtgggattacaggcgagagccactgcgcccggcccgttttaactttttgaggaacgaatatactgttatctgcagaagctggaccattttacattccaccaacagtgggcaagggtttcatcttttccacatcccaacacttactttccattttttaattacagctatcccagtgggtgggaggtggtaacccactgtagcactgattggcattttcctaatgattcatgatatcaaacatctttccatgtgctttttggccatttgtatatctttggagattgaagtcctttgcgcattgtttaattgtgttgtcttttttattgttaagagagtcctttatatattctggaagctagatccttatcagagacatgatttgcaaatattttctgtcattctgtaggttgtcttttttactttgttgatgtcttttgatgcatagaagttttgattttgatgaaatctagtttgtctatttattttctcactcttttggaatcatatctgagaaatggtattgttttactcctgttttcttataagagttttatagtttaaagcttttacatttagttctttgatccattttgagttaatttttgtgtgcgctgtaaggtagggatccagcttcattttcttttatgtggatatgtaattgttccagcaccatttgtttaaaaaaactgtggtcttggcattgttgttgaaaatcagttggccataggtgtatgggttatttctagagtctcaattctattccattgttatctgtatatccttgtgcctgcactataatgttttggttactgtagctttgtagtaagttttgaaattaggaagtgtgagtccagcacatagtagaaacttgatatatacgtattattgttttggtcaactcattcattgaatgaccaatttattcaacaaatagtttagtctcctcagtgccaggccctttgctgggttctgtggatgtgaatagaaattaaaataaggtggagtcatccaacagttacaactgggtgccatacgaattttactataaatatgtactggacactacactgactcagctgtaggaacagagtaggctgggaagcacctttgagatgaggccgtctggatgtaagagtctgtttctggcagcagagacctggagtgtgggaggcctgcttgctctgttagggtttgaactgtatcctgacgatcatgggaggcattggaggatttttaggcaggaaaatgatgtgaagggatttgcatttaaaagagattatttgggactgggcacagtggctcacgcctgtaattccagcactttgggaggcctagacaggcgggtcacctgaggtgggaagcttgagagcagcctgccaaaatggtgaaatcccatctctactaaaaatacaaaaattagccaggtgtggtggtgcacctgtaatcccagctactcaggaggctgaggcagaagaattgcttgaacctgggaggggaggttgctgtgagctgagatcgcaccactgcactccagcctgggtgacagagtgagactccatctcaaaacaaaataaataaataaataagagaataaaatagataatttgggcaacaggttgatgttaattccccacctttgttcttctccttcagtactgtgttggctggtctgaatcttttggcttttcatataaatttctgaaactgttgctatctgttctctgcctgttttatttttgttgttgttgtttggattttttgtttttttgagatagagtcttgctctgttgcccaggctggagtgcagtggtatgatctcagctcattgcaacctccccctctcaggttcaagcgattctcttgcctcatcctcctgagtagctgggattgcaggcatgcgccaccatgcccagctaatttttgtatttttagtagagatggggtttcactatgttggtgaggctggtgtcgaactcctgacctcatgatccacccgcctcggcctcccaaagtgctgggatgacaggcatgagccaccgtgtctggcctctctgcctgttttttaagacttttgtctttggagttttgcggtttctccactgtggttttccatatgaattttcttttatttcttctgcttaaaatttgtaggccagttggtcatggtggctcacgcccgtaatcccagtactttgggaggccgggtgggtggatcgcctgaggtcaggagtttgagaccagcctgaccaacatggagaaaccccatatctactaaaaatacaaaattagccgggcgtgatggtgcatgcctataatctcagatactcgggaggctgaggcaggcgaattgcttgaaccagggaggcggaggttgcggtgagctgagattaggccattgcactccagcctgggaaacaagagcgaaactccatctcaaaaaaaaaaaaataataataataattgtaggccttccttaagaaaaataaaataaaattctaggctgggcgcggtggctcctgcctgtaatcccagtactttgggaagctgaggcgggtggatcacctgagttaggagtttgagaccagcctggccaacatggtgaaaccccgtctctactaaaaatacaaagatgagccatttgtggtggcacccatctgtaatcccagctactcgggaggctgaggcaggagaattgctggaacccaggaggcagaagttgtagtgaaccgagatcatgccactgcactccagcctgggtgacagagcgagatgccatctcaaaaaaataaaatataaaataaaattctaagccctgcaaccaactgaatggagccctccccttggtcaagggaaccccagagaaaccttggaagcttgagttcctggccgtagcaggagaggaggtcagacgcgcctcactgtacccctccctccccagccaccattaggcttcttcactaagggctaaacagaaaccagcccttttcaaagactctacactgctaatgtggattactggtttatcttcccagatacagattaaagacaagatgagattaatggttccttcacccttccctgagaggtctgcttagttctcttcctctgtttccttctatcttaggtaaaatgtacatttactgggcacttactgaagtctcacaagtacgtaaccactcacctcacagccaccctccctctttgaaggaccacatgtaattactaaacctcctgagaacctcttgggacagaaacaagcacagatgtgccgtgactcatgtttttcctgtgggcaccctcaggctggctcagtagccctcacttgcttgagatcctgaatctgcgggttggcgtctttcatggttgctggatcatactctgccgttatctcttcggatatgagttgcccctagcccactatctggcccctctctttagggacctctgattgaacatacattagaccttctctctcctgctgttcctgatcactcttctgtcctgtaattgctgcttcttgtgctgcattctgggtaatttcttctggtcttttttccagtttactaatattgtattctgttataaggtccttccattgagtgtttctttctttcttttttcccaaacagcaactcaaaacagacattgagttttaattttggttcctgtactttttatttctagaagttctatttggttatttttcaagtctgctacattattacataattttttaataattttatatctttaatagatagttttttgttttgttttgttttgttttgttttttgagacagagtctcgctttgttgcccaggctggagtgcagtggtgcaatctcagctcacagcaacctccgcctcccaggttcaagtgattcccctgcctcagcctcccaagtagctgggattacaggcacgcatcaccacgcctggctaattttttgtgttttagtagagacagggtttcaccatgttggccaagacagtctcgatctcctgacctcgtgatctgcccacctcggcctcccgaagtcctgggattacagagctgagccactgcgcctggcctttgatagatatttcaagttcatcttttttttttgcttccttaatttttttttttgctataccccatgcctccaagataacagttttttctttttaatttaaatataatacagttttactgtgtatccaagaatatctgaaatctttcgtgggtctctttcttttgtcttttgtatctgttgctttttgctgggctgagcctgcttaaaacaagccccgttagctgtaaaggtttaccttagaaagtcaggtgtcttcctctgtaactctctcccttttccatctgctccaaggcatttatttatattaatcttgacgcaaagggaagttgtgtccacttcaccttggccagtaaggaagcagtgtttggcagatgttgttactcctaataatgccagccagtgagtgaagctgacctgaatgcctcccagggctgaggcaatggcatgatcaccgaagctcaaaccagagacagtttcacctttctgactgaatagtgttcggtgtaggccaaatgcctgcagactactgtttgaggactggtgtggtctaccaggtgtttccttagcgcctggatgtctctggctgccatcccagggatagagcatggtgttagatacgctagatgcctgccgaagtaattatgggtgaaacatatgatgtccaagatttgcttttaaaggctccaatacctcctcccagattccggagggctgtgaaacaattagctatgaaaactggtaattcctgaagctgggtacatgggggttcatgatccctctctcaccttttttgggggagaatgtttgagactttaataagaacttgttgccttttccttttacagggtgttgcaggcatcttcctcaggcctgttttctctgttttccaggctgacgtgatggcagacagggttccccgctgcccggtctgcaccggcgttgtgaagcccgacattgtgttctttggggagccgctgccccagaggttcttgctgcatgtggttgatttccccatggcagatctgctgctcatccttggg

SEQ ID NO: 14005 - DNA, 593 bp, Homo sapiens
tggggcgcttaataggtgtattaaaggtggaagaaggtccatatctttttctgtgggtgcttcaagtgttgttggaagtggaggcagcagtgacaaggggaagctttccctgcaggatgtagctgagctgattcgggccagagcctgccagagggtggtggtcatggtgggggccggcatcagcacacccagtggcattccagacttcagatcgccggggagtggcctgtacagcaacctccagcagtacgatctcccgtaccccgaggccatttttgaactcccattcttctttcacaaccccaagccctttttcactttggccaaggagctgtaccctggaaactacaagcccaacgtcactcactactttctccggctgcttcatgacaaggggctgcttctgcggctctacacgcagaacatcgatgggcttgagagaggctgacgtgatggcagacagggttccccgctgcccggtctgcaccggcgttgtgaagcccgacattgtgttctttggggagccgctgccccagaggttcttgctgcatgtggttgatttccccatggcagatctgctgctcatccttggg

SEQ ID NO: 14006 - DNA, 20165 bp, Homo sapiens
tggactgcgcggaacatggcgttctggggttggcgcgccgcggcagccctccggctgtggggccgggtagttgaacgggtcgaggccgggggaggcgtggggccgtttcaggcctgcggctgtcggctggtgcttggcggcagggacgatgtgagtgcggggctgagaggcagccatggggcccgcggtgagcccttggacccggcgcgccccttgcagaggcctcccagacccgaggtgcccagggcattccggaggcagccgagggcagcagctcccagtttcttcttttcgaggtattttgggcaaggacaagcacttcttgcgtgttcgttgtcgacacctcgcccactctttctcaccttgccgtgtttcctttgcggcatgtctgggagtttacgtgcgttccaacaccggggcctccgtctttatgctgatctgtggacgtcacttatgggggttttgtcgtttatttcaccattccctcattgaaatacgttctaacctttagttattgtgcatcatgctgtggtgaataaccttgttggcacctcactgtttgcataaattcctagtactgggattgctaggtccaaaagtatatgcatttaacgctttaatgatccctcataaatgttgtgcggttaatactcccactggcatgtgatcgtacccgtctccatagtaattgcatctaagaactgaggctacataggaaaaaatcttaaggtccatggttgttaggtatcagatgccctataatggatgaatatttaagtaaataatggcacattgacttgctgtctgacacaactgctgaaaatgttggtgaaaagtgagtctcgaagtggtagctcacacttgtaataccagcactttcggaggctgagacggggatcgctcgaggccaggagttcaagagcagcctgggcaacataacgagacccccatctctaccaaaaatttaaaaattagccgggcatggtggcgcaagcctgttgtcccagttactcctgagactaaggcaagaggatcccttgagtccaggagttcaaggctgcagtgagctatgattgagccactgcactccagcctgggtgacagagcaagactcttatctacctgtgggaaaaaaaaaagaaaaaagtttaatagatcctgaagagttggccgggcgcggtagctcacgcctgtaatcccagcactttgggaggatgagacgggtggataacgaggtcaggagttcgagaccagctgggccaacatggtgaaaccccatttctactgaaattacaaaaattagccgggcgtggtggcgggcgcctgtaatcctagctactcaggaggcggaggcaggagaatcacttgaacccggaaggcagaggttgcagtgagccgagatggcaccattgcactccagcccgggcgaaagagcaaaaactccgtctcaaaaaaaaacaaagatcccgaagagtcagtcgttcatccaagaagccctgactgagctcttattctgtgccagactctgttctaggtgctatggatggagcagggaccaggacctacaaacacgtggagcgcattctaatatctgtgatactctgcaaaactgttaaaacaaatccttgcggccgggcgcggtggctcacgcctgtaattccagcactttggaaggccgagacgggcggatcacgaggtcaggagatcgagaccatcctggctaacacagtgaaaccccgtctttactaaaaatacaaggaaattagccaggcgtggtggcgggtgcctgtagtcccagctactcgggaggctgaggcaggagaatggcgtgaacctgggaggcggagcttgcagtgagccgagatcgcgacactgcactccagcctgggcaacagagcgagactccgtctcaaaacaaaacaaaacaaaacaaaacaaaaatccttgctaccactggccctaaagcaggaggcatagggctgcgtgtgaggagtagtccattgcatgggcttcctccagtttggctttggatttttgagctctctgaatttgttgtttgtgtcctttgcacagtgtccctcccaggttgcacccatgcctgcccctcagggtcccccactcccagtgaatttcacaccatgcagcatgtactttaagccatacatcttacgtatgttccagacatttggtaaaacgccgtttatgtgtttttcagtgactcacaaacattttatttacgtaaatgaggaatgtactcaggcacccttcgtgataccttgccctcagcaggcactcaacagcaataataactttcattccttttgtgcttctcttaacagttcgtgtttagtaggagcacagtagctgtttggggaacgaccttaagtgaatagatgtctgaaatgctgtgtgaagtggggcgcttaataggtggtgagatggttttagaaccagggttttccctctttgcttcttgactccttaaccagttttcattaggagacccctttggaggtttgcagtcagtcagagttgagtgcctactgagtgtactgaattatgaaatgagcacagttcccattaacctgaattttttgctcccaagtaagtcttgatttctgatttatgactgctttttgttgtaccccaatagtcgtctaagaaaggtgattattttgagaggcctggggagacacacatgctcattctcgagggtggcggtggtgcagagggcagagccatgctcgttcttgctatcctgagattggttgctatctgtttcctttgctgctgtgtttttttctgtcagtattaaaggtggaagaaggtccatatctttttctgtgggtgcttcaagtgttgttggaagtggaggcagcagtgacaaggggaagctttccctgcaggatgtagctgagctgattcgggccagagcctgccagagggtggtggtcatggtgggggccggcatcagcacacccagtggcattccagacttcaggtactgcccacagtcccacctgccttctgcgctcccctcccctgactcctgccctccccactgcccagtttattccacttccctgtcctcttccaaaggcctcagagcctttcttctctccctgcagatcgccggggagtggcctgtacagcaacctccagcagtacgatctcccgtaccccgaggccatttttgaactcccattcttctttcacaaccccaagccctttttcactttggccaaggagctgtaccctggaaactacaagcccaacgtcactcactactttctccggctgcttcatgacaaggggctgcttctgcggctctacacgcagaacatcgatgggcttgagagaggtgagccctctgtgagtcgcacacattctttttctcccacggaggctcgggtgcctgtttctcccagggaggctcgggtgcctgtttctcacaggggatgctcgggtgcctgtttctggggacggccaaaacctatcgcttatgcttcttccttgggactttttttgagccaactagttagggctttgttcccaaggaaaatgtcctctgggtgtttaaaggccactgcttgttctcctgcatacctgcagagctgtgtattttgggcagaagttgacattgttttgccaatctggtgtgatgatctctttttttcttctctcttttaagaagtgtattatggaatttttttgagcacacacaaagagagcaatgtaacgaaccgtcctgtcctcatcaccagcacacagccagttcttcctgcgtcctcaccaccttcttccaaatccccagattattttgaagcaaatctctcacatcatgaatttaatctagaaataatctataaacacatgaatggatagctctagagaatactttaaaaacaactccggccgggtgccggattacaggtgtgggatcacacctgtaatcccagcattttgggaggccgaggcaggtagatcacctgaggtcgggagttcgagaccagcctggccaacgtggcaaaaccccgtctctactaaaaatacaaaaaattagccaggcgtggtggtgtgtgcctgtaatcccaggtactcgggaggctgagacaggagaatctcttgaacccagcaggcggaggttgcagtgagccgagatcgtgccacttcactccagcctgggcgacagagggagattctgtctcaaaaaaataaataaaaataaaaataattaaaaaataaaaacaactctgatagtgattcacactgaagaatcactagtaattccttaatatggtcacacttagtctgtggtgatttcttgaccgtatccatatggtgcccaaaccagcgattcacaggttgtgccaacttctggccgtgcacctaacggaagcacttggtggggccttttccttacgtgcagtgatgcagacaggtgctgggacagtcagctctccgggagccaggctcccggagagactgctgatgtgttgtcagttaaaaagaggtggcaccttggctccaggaatgtgtttccttgccagaaggatcccctgacttggaaccacagaggcagcagcggatgccccatgttggtgggctcttctcccagaggtgcagcagggcaggccttgtgggaaggtgggagctcctggctgtgagattcagcactgctgagttagggcagcgacagggacttgggaagcctcctgcagctgggaccctggctgtgccaccgcagcctttcagaaccagttaatactaacacaactttcataagaagtcactttttgtctgtttctaccaagcaattcttttggaatttatgatatttatatcctcattttaacttggtatctgtagaatagaagatatgttcctggatattagatataaatttttgagacagggtcttggctctgttgcccaggctagagtgcagtggcatgatcatagctcactatagcctgaactcttgggccgaagtgatccttttgcctcagcctctggaatagctgggactacgggcatgcactaccatgcctggctaattaaaaaaattttttaagacaagtctcactatgttgctgaggctggtctcaaactcctggcctcaagtgatcctcctgccttggccttccaaagcactgggattacaggcatgagccactgcacccagcctggtattaggtgtaatttttttttttttttttgagacagaatctcgctctcttacccaaactggagtgcggtggcacgacctcagctcactgcaacttccacctcccgggttcaagcgattctcctgtctcagcctccccgagtagctggcactacaggtgcctgccaccacatctggctaatttttgtatttttagtagaggtacggtttcaccatgatggccaggccggtcttgaactcctagcctcaaatgatctgcccacctcggcctcccaaagtgctgggattacaggtgtgggccactgtgcccggctggatataattttatttgagcttttatcaaatggtttttcgtactgagttttgacaggctttgttttaaccgtgatttggctccagctaggtgcccctttgctcccctgccttattctggttgatggcgcatgtaggtgatacgggcatgaaaaccaggcttgaggacatcacaaccccaaggggctgtgcctccttccaggagtcctgccaagcccagaagttgtgctcttggccttgcgtgctcatctcggaggcggcagcaacacttcgctttggcttgaatttcagtgtcgggcatccctgcctcaaagctggttgaagctcatggaacctttgcctctgccacctgcacagtctgccaaagacccttcccaggggaggacattcgggtgagttatcctgctgttggttgtccttctgcagtttgctgttggggtgatctggaaaagtggtattttataagcattgtctcgaaaggacagttgaacaataatagtgtgaaacattttatttgtaaattagaaaatcaatacatgcttgtaaaaaaatttaagacaatatagaaatatgtagggaaaatgaatctcccttcagccaattccagctgcccactttttttttttttttttgagattgagtctcactctgtcgcccaggctggagtgcagtgggcgatctcggctcactgcaacctccgtctcccggattcaaggaattcttctgcctcagcctcctaagtagctgggattacaggcgtgagccaccacgcccggcaatcagatggccttttgtgccgagcttatttcctgaaaatgtttctcgctccttcgccttgtagcttgtgttagtatttcatcctgtttcatggctaaatgttccactgatgtatgcaccacagttggtttgtttgtacatggatgggtgtttgggttgtcccacctttctgctcttgtgtatagttctgctgtggagcatatgcaagtattcgtttgagagtccttgttttttattcttttgagtatgatacctacaagtattgctgggtaactccacgtttagctatatttatttatttattttttgagacacagtcttacactgtcacccaggctggagtgcaatggcgcgatttcggctcaatacaacctctgcctcccgggttcaagcgattctcctgcctcagcctcctgagaagctgggattacaggtgcctgccaccatgcccagctaatgttttttgtatttctagtagagatggggtttcaccatgttggccaggctgctcttgcattcctgacctcaggtggttcacccgcctcggcctcccaaagtgctaagattacaggcgtgagccaccatgccctgcccatgtttaacttttttgtttgtttgttttgagacggagtctagctcttatcaccaggctggagtgcagtggcgcaatctcggctcactgtaccatccgcctcctgggttcaagcgattctcctgcctcagcttcctgagtagctgggactacaggcacacaccaccacgcccggctaatttttgtatttagtagagtagtttcaccatgttggccaggatgtctcgatctcttgacctcgtgatccgcctgcctctttctcccaaagtgtgggattacaggcgagagccactgcgcccggcccgttttaactttttgaggaacgaatatactgttatctgcagaagctggaccattttacattccaccaacagtgggcaagggtttcatcttttccacatcccaacacttactttccattttttaattacagctatcccagtgggtgggaggtggtaacccactgtagcactgattggcattttcctaatgattcatgatatcaaacatctttccatgtgctttttggccatttgtatatctttggagattgaagtcctttgcgcattgtttaattgtgttgtcttttttattgttaagagagtcctttatatattctggaagctagatccttatcagagacatgatttgcaaatattttctgtcattctgtaggttgtcttttttactttgttgatgtcttttgatgcatagaagttttgattttgatgaaatctagtttgtctatttattttctcactcttttggaatcatatctgagaaatggtattgttttactcctgttttcttataagagttttatagtttaaagcttttacatttagttctttgatccattttgagttaatttttgtgtgcgctgtaaggtagggatccagcttcattttcttttatgtggatatgtaattgttccagcaccatttgtttaaaaaaactgtggtcttggcattgttgttgaaaatcagttggccataggtgtatgggttatttctagagtctcaattctattccattgttatctgtatatccttgtgcctgcactataatgttttggttactgtagctttgtagtaagttttgaaattaggaagtgtgagtccagcacatagtagaaacttgatatatacgtattattgttttggtcaactcattcattgaatgaccaatttattcaacaaatagtttagtctcctcagtgccaggccctttgctgggttctgtggatgtgaatagaaattaaaataaggtggagtcatccaacagttacaactgggtgccatacgaattttactataaatatgtactggacactacactgactcagctgtaggaacagagtaggctgggaagcacctttgagatgaggccgtctggatgtaagagtctgtttctggcagcagagacctggagtgtgggaggcctgcttgctctgttagggtttgaactgtatcctgacgatcatgggaggcattggaggatttttaggcaggaaaatgatgtgaagggatttgcatttaaaagagattatttgggactgggcacagtggctcacgcctgtaattccagcactttgggaggcctagacaggcgggtcacctgaggtgggaagcttgagagcagcctgccaaaatggtgaaatcccatctctactaaaaatacaaaaattagccaggtgtggtggtgcacctgtaatcccagctactcaggaggctgaggcagaagaattgcttgaacctgggaggggaggttgctgtgagctgagatcgcaccactgcactccagcctgggtgacagagtgagactccatctcaaaacaaaataaataaataaataagagaataaaatagataatttgggcaacaggttgatgttaattccccacctttgttcttctccttcagtactgtgttggctggtctgaatcttttggcttttcatataaatttctgaaactgttgctatctgttctctgcctgttttatttttgttgttgttgtttggattttttgtttttttgagatagagtcttgctctgttgcccaggctggagtgcagtggtatgatctcagctcattgcaacctccccctctcaggttcaagcgattctcttgcctcatcctcctgagtagctgggattgcaggcatgcgccaccatgcccagctaatttttgtatttttagtagagatggggtttcactatgttggtgaggctggtgtcgaactcctgacctcatgatccacccgcctcggcctcccaaagtgctgggatgacaggcatgagccaccgtgtctggcctctctgcctgttttttaagacttttgtctttggagttttgcggtttctccactgtggttttccatatgaattttcttttatttcttctgcttaaaatttgtaggccagttggtcatggtggctcacgcccgtaatcccagtactttgggaggccgggtgggtggatcgcctgaggtcaggagtttgagaccagcctgaccaacatggagaaaccccatatctactaaaaatacaaaattagccgggcgtgatggtgcatgcctataatctcagatactcgggaggctgaggcaggcgaattgcttgaaccagggaggcggaggttgcggtgagctgagattaggccattgcactccagcctgggaaacaagagcgaaactccatctcaaaaaaaaaaaaataataataataattgtaggccttccttaagaaaaataaaataaaattctaggctgggcgcggtggctcctgcctgtaatcccagtactttgggaagctgaggcgggtggatcacctgagttaggagtttgagaccagcctggccaacatggtgaaaccccgtctctactaaaaatacaaagatgagccatttgtggtggcacccatctgtaatcccagctactcgggaggctgaggcaggagaattgctggaacccaggaggcagaagttgtagtgaaccgagatcatgccactgcactccagcctgggtgacagagcgagatgccatctcaaaaaaataaaatataaaataaaattctaagccctgcaaccaactgaatggagccctccccttggtcaagggaaccccagagaaaccttggaagcttgagttcctggccgtagcaggagaggaggtcagacgcgcctcactgtacccctccctccccagccaccattaggcttcttcactaagggctaaacagaaaccagcccttttcaaagactctacactgctaatgtggattactggtttatcttcccagatacagattaaagacaagatgagattaatggttccttcacccttccctgagaggtctgcttagttctcttcctctgtttccttctatcttaggtaaaatgtacatttactgggcacttactgaagtctcacaagtacgtaaccactcacctcacagccaccctccctctttgaaggaccacatgtaattactaaacctcctgagaacctcttgggacagaaacaagcacagatgtgccgtgactcatgtttttcctgtgggcaccctcaggctggctcagtagccctcacttgcttgagatcctgaatctgcgggttggcgtctttcatggttgctggatcatactctgccgttatctcttcggatatgagttgcccctagcccactatctggcccctctctttagggacctctgattgaacatacattagaccttctctctcctgctgttcctgatcactcttctgtcctgtaattgctgcttcttgtgctgcattctgggtaatttcttctggtcttttttccagtttactaatattgtattctgttataaggtccttccattgagtgtttctttctttcttttttcccaaacagcaactcaaaacagacattgagttttaattttggttcctgtactttttatttctagaagttctatttggttatttttcaagtctgctacattattacataattttttaataattttatatctttaatagatagttttttgttttgttttgttttgttttgttttttgagacagagtctcgctttgttgcccaggctggagtgcagtggtgcaatctcagctcacagcaacctccgcctcccaggttcaagtgattcccctgcctcagcctcccaagtagctgggattacaggcacgcatcaccacgcctggctaattttttgtgttttagtagagacagggtttcaccatgttggccaagacagtctcgatctcctgacctcgtgatctgcccacctcggcctcccgaagtcctgggattacagagctgagccactgcgcctggcctttgatagatatttcaagttcatcttttttttttgcttccttaatttttttttttgctataccccatgcctccaagataacagttttttctttttaatttaaatataatacagttttactgtgtatccaagaatatctgaaatctttcgtgggtctctttcttttgtcttttgtatctgttgctttttgctgggctgagcctgcttaaaacaagccccgttagctgtaaaggtttaccttagaaagtcaggtgtcttcctctgtaactctctcccttttccatctgctccaaggcatttatttatattaatcttgacgcaaagggaagttgtgtccacttcaccttggccagtaaggaagcagtgtttggcagatgttgttactcctaataatgccagccagtgagtgaagctgacctgaatgcctcccagggctgaggcaatggcatgatcaccgaagctcaaaccagagacagtttcacctttctgactgaatagtgttcggtgtaggccaaatgcctgcagactactgtttgaggactggtgtggtctaccaggtgtttccttagcgcctggatgtctctggctgccatcccagggatagagcatggtgttagatacgctagatgcctgccgaagtaattatgggtgaaacatatgatgtccaagatttgcttttaaaggctccaatacctcctcccagattccggagggctgtgaaacaattagctatgaaaactggtaattcctgaagctgggtacatgggggttcatgatccctctctcaccttttttgggggagaatgtttgagactttaataagaacttgttgccttttccttttacagggtgttgcaggcatcttcctcaggcctgttttctctgttttccaggctgacgtgatggcagacagggttccccgctgcccggtctgcaccggcgttgtgaagcccgacattgtgttctttggggagccgctgccccagaggttcttgctgcatgtggttgatttccccatggcagatctgctgctcatccttgggacctccctggaggtttgtcagcaggcctgtgcagggaggaggctggagggcaggggaagggaggggtacaggagtcatctcatgggctgtcggcaggcctgtgcagggaggagtctggagggcaggggaagggaggggtacaggagtcacctcatgggctgtcggcaggcctgtgcagggaggaggctggagggcaggggaagggaggggtacaggagtcatctcatgggctgtcggcaggcctgtgcagggaggaggctggagggcaggggaagggaggggtacaggagtcatctcatgggcccttccagggctggtgccactttgggaaggtgaatggattcagctggggttccaggctgagggagcagcagcctgtgcaggagacaggaaggtgggaagctgctgggctttggaggtggtataggtgtgggtggggcaccacgtgtgaggagaagggagaaggatgggggtgtgggggcgaggtggaggggcagggcctcccaggtcagatcaggaatactgatgctgcagtgggaggagtgataaatccacagggactggcccggggacgtagctgcacccttggggtcagggaggcctttggggagtggagagtggagcaagcagtgccaggaggctggtcctggagaaggtggagctgtggtcgcctgagggatggcgaggagggggactggactcgcagtctgtgatgttttggggacgtgagaaggaggcgtctggcttggtctgtaaggtcagggcacttgctggtgaggcgtgatttgggagggaggatgcccagctcggttctgtgtgtgtctgaggtgtcgggaaacatgccctggatgtgttcaagcagctgttctgcgtctgcgtctgcagctcaggaaattcctaaaagctgtgatgagagcaagaaatgagaccatgaagtcagtgtgtgcgtgactggatgtaggcaccgaggacagaagggccagaaagacctgtgctcagaggggcccagggcagccacaggggcccagagcatgtgtttgttcaggcattcattgtgtgctgggccctgctccagtgctttggacatacacggtcagatgtcagtgtaagaagttatatagtttgttaggagatgattgatgttatgagaaagataacaagtaggatagaaaggctagaagggttgggaaccagctgcagtgtcaagtcaggcaggtggagttggatctaagagtttaccgaggtgaggagggtctggcaggggacactgcacaggtgacaagcagcaaggagggtggggcgaagtcagcattgatggccacggggctggagcagagaagaaggtggggcacaagtgtcatctcatgggaggctggcgccacctcagaaggtgaatgggttcagcttgggttccaggccagagtctgaagttgagaggactccgttgggtgctgggctgtgagcccaccatgggggcaagactgggagcagcagacccagcagggcccttgtaggtaatcaccggctggcactggctgggggccaggtaaagccagcagaggctgaggggtgctggagtctgggtgtgtgtgaacgcagagtgggtacgctggcacagtgcatgggaggccgtggattcccaaggaccccagggctgtggctggagcagctggaaagacggagccgccgcttcctgagatggagaagcctggtaggtgggtttgggggagctcaggaactcagccttgtttccacggatttgaggatgtgctgcggactggaggtgttgagcaggtggacatgagtctggagtccaggaaggcccagaggcaggagctggggtgctggagtgagcagacaggagagcccagggtgtggacagacatgagaatgccatgctaggcctaggatggagggacagacacaggaggagcagtcagaggggccatggtggtcagcacagtgtgggctgagaccagctgaccgtgctggccaccaggtgtggacacttgggccaccagccatctttattgttgaagtgaaatgaaaatggcctttttcctgattataagtgtatcatgtgtgtctttgaaaagattcgtacattatataaagatataaagcaaaggatcaactttttaatcccaccaactgttagcattttattctgtgtcctctcagctttcttttttttgtacaaatgcatacgtacagatggtaattttaaactaaaagttggacagcactgtacattctattctgcagcctgctgttttcacgtaacaatgtgagtccatggagatgtgctgcgttgttaatgccaacagtttcccttacacggatatgaggtcccaactgagaaacccatgtctgtaaggctggtgccatcatgaactgaatgagctggtgtcacgcacagactctatctcatgtgctttgtggacgaaatgttaatgtgtttgactgtggagtaccactccagatcccctttaggtgtgacataacgtgggatgtaaaccatatgatcttttctaaaatctcaaaaattctgaaacatattcagccacaagagctttaacatagattttgtggatttaatacaaaatttatgtaagcaatttcttactgatggacaatgataataaatagtatataatttttacattaaaagtaatgctgggccaggcaccgtggctcacacctgttatcccagcactctgggaggccaaggcaggaagattgcctgaagctaggcatttgagaccagcctgggcagtatagtcagacctcgtctctacaaaaaataaaaagatagccaggcatggtctgtgtagttgcagctatttgagaggctgaggaaggaggattgcttgagcccaggaatttgaggttatagtgaactatgatcatgccactgcattccagcctgggtaacagaatgagatcccgtgctgtagtgaatatccctgtgtatcatccttatctactcatgcaagtactcctgaagggtaaatgctgtagtgaatatccctgtgtatcatccttatctacccatgcaagtactctggaagggtaaatgctgataaatactgagaacttgccttccggtgaatatccctgtgtgtcatccttatctacccatgcaagtactcctgaagggtaaatgctgtagtgaatatccctgtgtatcatccttatctacccatgcaagtactctggaagggtaaatgctgataaatactgagaacttgccttccggtgaatatccctgtgtgtcatccttatctacccatgcaagtactcctgaagggtaaatgctgtggtgaatatccctgtgtatcatccttatctacccatgcaagaactcctgaagggtaaatgctgataaatattgagaacttgccttccagaaagatgtaacaattacactgccacaaactgtgtttttatgtagccattttatcacatcctcaccaaaaccaaaatcacacaaatcaaattggttaaaaaatgcatgtgtgtgtgtggaggggggtgcggattttgcctttctgtagtaaagaatgaagttcatcttttcatgtttattgccagttgtgtttcttctctttggattgtatatttgtacctcttgaccatttttcattgggtcattataaattagcaatataaattagttttaattttagtataaattaaataatataattacattttaatgttaatataaacttctttcttttttttttttttttttttgagacagagtcttgctctgtctcccaggctggaggttcagtggcgcgatctcggctcactgcaacctccacctcccaggctcaagccattctcctgcctcaacctcccgagtagctcggattataggtgcgtgccaccacgcccagctaagttttgtatttttagtagagacgtggtttcactatgttggccaggctggtcttgaactcctgacctcagctgatctgcccgcctcggcctcccaaagtgctgggattataggtgtgaaccaccatgcccagctgttaatataaatttcattataaattagcattataaattagttcataaattatatgtttataaatgagtttatcaattagcaatataaactattgtcatatgttgtaaatatttttgcagtttatgatgatgagaggtttttaaaaattttaaattttctacatagtagttttatgtagataccgagataatagtatttacatagtcagatctgtcattttcctttgccttatctgacttcagtttttacgcctagaacgttcttccctatccttacttgtaaatccttagttttcttcaagaactgttttgtttacattgaaacctttaatccatttgaatttttttcagtgggaggtaggaatggagtattttcctcccagataatgagccagttttaatgccatttattaatgtatccatttttttaccttgttcctcttaaaagaagctttgagagctgtatgaagaagcctgatggcaccgagctaggcctctctagaggctgggtggggaagaccatggagagacgtaacagtaactcctgctcgggggcaccagctcgtctgggtgcccgatgctggtggtggctgtcagagcaagcagggctagccagaggagatggacgagtctgtgctgttgtccctctgcgtcatgctgggagacagcgaggtggggaggacagggagaacagaacgtgctcacaaagaggaggcaggaaggttggatccctgatgagccttggaacggaggtggggaaaagcaaggatgtgtggaaacagcaagaagtgggagagagagagagaggcggaggggagaaaaccgtcacggaggccaagcggcaggagctcagctgaagaaatgagattggtggtgggttttccctatatcgcaggctctgactgccaatctgctgctcctccaaggcctcggtggctgtggcatgaaacatcctgaggagcttgtaaagtggacactgtgcccctcacgtttggcccatttttcaggtggagccttttgccagcttgaccgaggccgtgcggagctcagttccccgactgctcatcaaccgggacttggtggggcccttggcttggcatcctcgcagcagggacgtggcccagctgggggacgtggttcacggcgtggaaagcctagtggagcttctgggctggacagaagagatgcgggaccttgtgcagcgggaaactgggaaggtacagactgctgaggaggaccatccaaggggctgcccttctcactgctctagggtatggtccacctgatatggagccccgttggttaacacagtaacagtaatagctgatgatgctgtgaatcctgcaccaggcactacctggacctgactgggtgttactttcaatacctccatttagagatgaggaaacagatgctaacaggccaagcagggacacggtccagacactcagggctgatgagtctgtattcttaacagactataggcgttaccttcactccctaaaataaagcagccaacagtgtccctctaaggcctggtatgtgattctaagatgatacgggttaaagaactttgagaagctaaagttctctgcatctatgtgggatgaaggctacatgagtgatgcttttcggaagtaattggtatgagagccattgatcaattataatccgctgaggaaagccaaagagccttgatgctttctaagagatttcaaaccgcctataaacaagtgaagttacagaaaatgcagtttcccataagaatcatgtagcatgtgtagccttgatattaagggttttcaatgggaggtggtagcattaagcatttaaagtccagtgtcatgattacaggcaggtgtaacactgtccaaaggggatttcaccagtgtattagtctgttctctggctgctcataaaggcatacctgagactgggtaatttataaaggaaagaggtttaatggactcacagttccatatggctgtgggggcctcacaatcatagtggaaggcaaagcaggagcaaagtactgtcttacaaggtggcaggcaagaggacgtgtgcgggggaactgccctttataaaactatcagatcttgtgagacttattcactatcagaagaagagtgtgggaaagacccgcccccatgattcagttacttccacttggccccacccttgacacatggggatgattacaattcaaggtgagatttgggtggggacacagccaaaccatatcaactacaatatatcacagttgatgctcctcttgccttccaaggcagatgtcttaggaaatcctgatcctttttccttgtccacagctgtggctgcctcatggctcagggccatggggtcagcactctcctcacctccaccagtccaagacctccaacctctggttgcaggctgattttttaccaatcatggtcacttcattatggaggcagggaacccagctaacaatgaggcttaaacgctgagaggcgagtgcctcctggccagctcacaaggcagcggagatcttagatcagcccagcaggcttttttgagggatccttttcctgctccaacttcatattttcttttttttgtaatggagtttcactcttgttgcccaagctggagtgcaatggcacgattttggctcactgcagccctgcctcctgggttcaagtgattctcctgcctcagcctcctgagcagctgggattacaggcatgtgccaccatgcctggctaatttctgtacttttattagagatgggatttcatcatgttagtcaggctggtctcaaactcctgacctcgggtgatccacctgcctcagcctcccaaagtgctgggattataggcatgagccagcaggcccggcccaacttcctgttttcatagaaaagcagattgtaactctggtagctcctgtggagttttggaagtggcttaataggatttgaactgtataatctagtttcagagaaatgtatgtaaaatgggttatgatttcattttctgttttttacagcattactatccaaggggttacttttccaaatagtgaatgcttttaagcacatgagcatcagtacatattgatttgggtactttaagacccatagaatgaggctctccatttagccaccctgttctgcccaggcctgctgggatcctcttagcccagcacagcagcagcagtatttgcagaaagcagcttgttttgtgaaatattttgcatgtctgcagctagagctgtttgaacagagatctgctggcctgcctgggtgtgtaaacagatagctgataccctctgtcttctgtattccagcttgatggaccagacaaataggatgatggctgcccccacacaataaatggtaacataggagacatccacatcccaattctgacaagacctcatgcctgaagacagcttgggcaggtgaaaccagaatatgtgaactgagtggacacccgaggctgccactggaatgtcttctcaggccatgagctgcagtgactggtagggctgtgtttacagtcagggccaccccgtcacatatacaaaggagctgcctgcctgtttgctgtgttgaactcttcactctgctgaagctcctaatggaaaaagctttcttctgactgtgaccctcttgaactgaatcagaccaactggaatcccagaccgagtctgctttctgtgcctagttgaacggcaagctcggcatctgttggttacaagatccagacttgggccgagcggtccccagccctcttcatgttccgaagtgtagtcttgaggccctggtgccgcacttctagcatgttggtctcctttagtggggctatttttaatgagagaaaatct

SEQ ID NO: 14007 - DNA, 1588 bp, Homo sapiens
tggactgcgcggaacatggcgttctggggttggcgcgccgcggcagccctccggctgtggggccgggtagttgaacgggtcgaggccgggggaggcgtggggccgtttcaggcctgcggctgtcggctggtgcttggcggcagggacgattattaaaggtggaagaaggtccatatctttttctgtgggtgcttcaagtgttgttggaagtggaggcagcagtgacaaggggaagctttccctgcaggatgtagctgagctgattcgggccagagcctgccagagggtggtggtcatggtgggggccggcatcagcacacccagtggcattccagacttcagatcgccggggagtggcctgtacagcaacctccagcagtacgatctcccgtaccccgaggccatttttgaactcccattcttctttcacaaccccaagccctttttcactttggccaaggagctgtaccctggaaactacaagcccaacgtcactcactactttctccggctgcttcatgacaaggggctgcttctgcggctctacacgcagaacatcgatgggcttgagagagtgtcgggcatccctgcctcaaagctggttgaagctcatggaacctttgcctctgccacctgcacagtctgccaaagacccttcccaggggaggacattcgggctgacgtgatggcagacagggttccccgctgcccggtctgcaccggcgttgtgaagcccgacattgtgttctttggggagccgctgccccagaggttcttgctgcatgtggttgatttccccatggcagatctgctgctcatccttgggacctccctggaggtggagccttttgccagcttgaccgaggccgtgcggagctcagttccccgactgctcatcaaccgggacttggtggggcccttggcttggcatcctcgcagcagggacgtggcccagctgggggacgtggttcacggcgtggaaagcctagtggagcttctgggctggacagaagagatgcgggaccttgtgcagcgggaaactgggaagcttgatggaccagacaaataggatgatggctgcccccacacaataaatggtaacataggagacatccacatcccaattctgacaagacctcatgcctgaagacagcttgggcaggtgaaaccagaatatgtgaactgagtggacacccgaggctgccactggaatgtcttctcaggccatgagctgcagtgactggtagggctgtgtttacagtcagggccaccccgtcacatatacaaaggagctgcctgcctgtttgctgtgttgaactcttcactctgctgaagctcctaatggaaaaagctttcttctgactgtgaccctcttgaactgaatcagaccaactggaatcccagaccgagtctgctttctgtgcctagttgaacggcaagctcggcatctgttggttacaagatccagacttgggccgagcggtccccagccctcttcatgttccgaagtgtagtcttgaggccctggtgccgcacttctagcatgttggtctcctttagtggggctatttttaatgagagaaaatct

SEQ ID NO: 14008 - DNA, 19828 bp, Homo sapiens
aggactccttggactgcgcggaacatggcgttctggggttggcgcgccgcggcagccctccggctgtggggccgggtagttgaacgggtcgaggccgggggaggcgtggggccgtttcaggcctgcggctgtcggctggtgcttggcggcagggacgatgtgagtgcggggctgagaggcagccatggggcccgcggtgagcccttggacccggcgcgccccttgcagaggcctcccagacccgaggtgcccagggcattccggaggcagccgagggcagcagctcccagtttcttcttttcgaggtattttgggcaaggacaagcacttcttgcgtgttcgttgtcgacacctcgcccactctttctcaccttgccgtgtttcctttgcggcatgtctgggagtttacgtgcgttccaacaccggggcctccgtctttatgctgatctgtggacgtcacttatgggggttttgtcgtttatttcaccattccctcattgaaatacgttctaacctttagttattgtgcatcatgctgtggtgaataaccttgttggcacctcactgtttgcataaattcctagtactgggattgctaggtccaaaagtatatgcatttaacgctttaatgatccctcataaatgttgtgcggttaatactcccactggcatgtgatcgtacccgtctccatagtaattgcatctaagaactgaggctacataggaaaaaatcttaaggtccatggttgttaggtatcagatgccctataatggatgaatatttaagtaaataatggcacattgacttgctgtctgacacaactgctgaaaatgttggtgaaaagtgagtctcgaagtggtagctcacacttgtaataccagcactttcggaggctgagacggggatcgctcgaggccaggagttcaagagcagcctgggcaacataacgagacccccatctctaccaaaaatttaaaaattagccgggcatggtggcgcaagcctgttgtcccagttactcctgagactaaggcaagaggatcccttgagtccaggagttcaaggctgcagtgagctatgattgagccactgcactccagcctgggtgacagagcaagactcttatctacctgtgggaaaaaaaaaagaaaaaagtttaatagatcctgaagagttggccgggcgcggtagctcacgcctgtaatcccagcactttgggaggatgagacgggtggataacgaggtcaggagttcgagaccagctgggccaacatggtgaaaccccatttctactgaaattacaaaaattagccgggcgtggtggcgggcgcctgtaatcctagctactcaggaggcggaggcaggagaatcacttgaacccggaaggcagaggttgcagtgagccgagatggcaccattgcactccagcccgggcgaaagagcaaaaactccgtctcaaaaaaaaacaaagatcccgaagagtcagtcgttcatccaagaagccctgactgagctcttattctgtgccagactctgttctaggtgctatggatggagcagggaccaggacctacaaacacgtggagcgcattctaatatctgtgatactctgcaaaactgttaaaacaaatccttgcggccgggcgcggtggctcacgcctgtaattccagcactttggaaggccgagacgggcggatcacgaggtcaggagatcgagaccatcctggctaacacagtgaaaccccgtctttactaaaaatacaaggaaattagccaggcgtggtggcgggtgcctgtagtcccagctactcgggaggctgaggcaggagaatggcgtgaacctgggaggcggagcttgcagtgagccgagatcgcgacactgcactccagcctgggcaacagagcgagactccgtctcaaaacaaaacaaaacaaaacaaaacaaaaatccttgctaccactggccctaaagcaggaggcatagggctgcgtgtgaggagtagtccattgcatgggcttcctccagtttggctttggatttttgagctctctgaatttgttgtttgtgtcctttgcacagtgtccctcccaggttgcacccatgcctgcccctcagggtcccccactcccagtgaatttcacaccatgcagcatgtactttaagccatacatcttacgtatgttccagacatttggtaaaacgccgtttatgtgtttttcagtgactcacaaacattttatttacgtaaatgaggaatgtactcaggcacccttcgtgataccttgccctcagcaggcactcaacagcaataataactttcattccttttgtgcttctcttaacagttcgtgtttagtaggagcacagtagctgtttggggaacgaccttaagtgaatagatgtctgaaatgctgtgtgaagtggggcgcttaataggtggtgagatggttttagaaccagggttttccctctttgcttcttgactccttaaccagttttcattaggagacccctttggaggtttgcagtcagtcagagttgagtgcctactgagtgtactgaattatgaaatgagcacagttcccattaacctgaattttttgctcccaagtaagtcttgatttctgatttatgactgctttttgttgtaccccaatagtcgtctaagaaaggtgattattttgagaggcctggggagacacacatgctcattctcgagggtggcggtggtgcagagggcagagccatgctcgttcttgctatcctgagattggttgctatctgtttcctttgctgctgtgtttttttctgtcagtattaaaggtggaagaaggtccatatctttttctgtgggtgcttcaagtgttgttggaagtggaggcagcagtgacaaggggaagctttccctgcaggatgtagctgagctgattcgggccagagcctgccagagggtggtggtcatggtgggggccggcatcagcacacccagtggcattccagacttcaggtactgcccacagtcccacctgccttctgcgctcccctcccctgactcctgccctccccactgcccagtttattccacttccctgtcctcttccaaaggcctcagagcctttcttctctccctgcagatcgccggggagtggcctgtacagcaacctccagcagtacgatctcccgtaccccgaggccatttttgaactcccattcttctttcacaaccccaagccctttttcactttggccaaggagctgtaccctggaaactacaagcccaacgtcactcactactttctccggctgcttcatgacaaggggctgcttctgcggctctacacgcagaacatcgatgggcttgagagaggtgagccctctgtgagtcgcacacattctttttctcccacggaggctcgggtgcctgtttctcccagggaggctcgggtgcctgtttctcacaggggatgctcgggtgcctgtttctggggacggccaaaacctatcgcttatgcttcttccttgggactttttttgagccaactagttagggctttgttcccaaggaaaatgtcctctgggtgtttaaaggccactgcttgttctcctgcatacctgcagagctgtgtattttgggcagaagttgacattgttttgccaatctggtgtgatgatctctttttttcttctctcttttaagaagtgtattatggaatttttttgagcacacacaaagagagcaatgtaacgaaccgtcctgtcctcatcaccagcacacagccagttcttcctgcgtcctcaccaccttcttccaaatccccagattattttgaagcaaatctctcacatcatgaatttaatctagaaataatctataaacacatgaatggatagctctagagaatactttaaaaacaactccggccgggtgccggattacaggtgtgggatcacacctgtaatcccagcattttgggaggccgaggcaggtagatcacctgaggtcgggagttcgagaccagcctggccaacgtggcaaaaccccgtctctactaaaaatacaaaaaattagccaggcgtggtggtgtgtgcctgtaatcccaggtactcgggaggctgagacaggagaatctcttgaacccagcaggcggaggttgcagtgagccgagatcgtgccacttcactccagcctgggcgacagagggagattctgtctcaaaaaaataaataaaaataaaaataattaaaaaataaaaacaactctgatagtgattcacactgaagaatcactagtaattccttaatatggtcacacttagtctgtggtgatttcttgaccgtatccatatggtgcccaaaccagcgattcacaggttgtgccaacttctggccgtgcacctaacggaagcacttggtggggccttttccttacgtgcagtgatgcagacaggtgctgggacagtcagctctccgggagccaggctcccggagagactgctgatgtgttgtcagttaaaaagaggtggcaccttggctccaggaatgtgtttccttgccagaaggatcccctgacttggaaccacagaggcagcagcggatgccccatgttggtgggctcttctcccagaggtgcagcagggcaggccttgtgggaaggtgggagctcctggctgtgagattcagcactgctgagttagggcagcgacagggacttgggaagcctcctgcagctgggaccctggctgtgccaccgcagcctttcagaaccagttaatactaacacaactttcataagaagtcactttttgtctgtttctaccaagcaattcttttggaatttatgatatttatatcctcattttaacttggtatctgtagaatagaagatatgttcctggatattagatataaatttttgagacagggtcttggctctgttgcccaggctagagtgcagtggcatgatcatagctcactatagcctgaactcttgggccgaagtgatccttttgcctcagcctctggaatagctgggactacgggcatgcactaccatgcctggctaattaaaaaaattttttaagacaagtctcactatgttgctgaggctggtctcaaactcctggcctcaagtgatcctcctgccttggccttccaaagcactgggattacaggcatgagccactgcacccagcctggtattaggtgtaatttttttttttttttttgagacagaatctcgctctcttacccaaactggagtgcggtggcacgacctcagctcactgcaacttccacctcccgggttcaagcgattctcctgtctcagcctccccgagtagctggcactacaggtgcctgccaccacatctggctaatttttgtatttttagtagaggtacggtttcaccatgatggccaggccggtcttgaactcctagcctcaaatgatctgcccacctcggcctcccaaagtgctgggattacaggtgtgggccactgtgcccggctggatataattttatttgagcttttatcaaatggtttttcgtactgagttttgacaggctttgttttaaccgtgatttggctccagctaggtgcccctttgctcccctgccttattctggttgatggcgcatgtaggtgatacgggcatgaaaaccaggcttgaggacatcacaaccccaaggggctgtgcctccttccaggagtcctgccaagcccagaagttgtgctcttggccttgcgtgctcatctcggaggcggcagcaacacttcgctttggcttgaatttcagtgtcgggcatccctgcctcaaagctggttgaagctcatggaacctttgcctctgccacctgcacagtctgccaaagacccttcccaggggaggacattcgggtgagttatcctgctgttggttgtccttctgcagtttgctgttggggtgatctggaaaagtggtattttataagcattgtctcgaaaggacagttgaacaataatagtgtgaaacattttatttgtaaattagaaaatcaatacatgcttgtaaaaaaatttaagacaatatagaaatatgtagggaaaatgaatctcccttcagccaattccagctgcccactttttttttttttttttgagattgagtctcactctgtcgcccaggctggagtgcagtgggcgatctcggctcactgcaacctccgtctcccggattcaaggaattcttctgcctcagcctcctaagtagctgggattacaggcgtgagccaccacgcccggcaatcagatggccttttgtgccgagcttatttcctgaaaatgtttctcgctccttcgccttgtagcttgtgttagtatttcatcctgtttcatggctaaatgttccactgatgtatgcaccacagttggtttgtttgtacatggatgggtgtttgggttgtcccacctttctgctcttgtgtatagttctgctgtggagcatatgcaagtattcgtttgagagtccttgttttttattcttttgagtatgatacctacaagtattgctgggtaactccacgtttagctatatttatttatttattttttgagacacagtcttacactgtcacccaggctggagtgcaatggcgcgatttcggctcaatacaacctctgcctcccgggttcaagcgattctcctgcctcagcctcctgagaagctgggattacaggtgcctgccaccatgcccagctaatgttttttgtatttctagtagagatggggtttcaccatgttggccaggctgctcttgcattcctgacctcaggtggttcacccgcctcggcctcccaaagtgctaagattacaggcgtgagccaccatgccctgcccatgtttaacttttttgtttgtttgttttgagacggagtctagctcttatcaccaggctggagtgcagtggcgcaatctcggctcactgtaccatccgcctcctgggttcaagcgattctcctgcctcagcttcctgagtagctgggactacaggcacacaccaccacgcccggctaatttttgtatttagtagagtagtttcaccatgttggccaggatgtctcgatctcttgacctcgtgatccgcctgcctctttctcccaaagtgtgggattacaggcgagagccactgcgcccggcccgttttaactttttgaggaacgaatatactgttatctgcagaagctggaccattttacattccaccaacagtgggcaagggtttcatcttttccacatcccaacacttactttccattttttaattacagctatcccagtgggtgggaggtggtaacccactgtagcactgattggcattttcctaatgattcatgatatcaaacatctttccatgtgctttttggccatttgtatatctttggagattgaagtcctttgcgcattgtttaattgtgttgtcttttttattgttaagagagtcctttatatattctggaagctagatccttatcagagacatgatttgcaaatattttctgtcattctgtaggttgtcttttttactttgttgatgtcttttgatgcatagaagttttgattttgatgaaatctagtttgtctatttattttctcactcttttggaatcatatctgagaaatggtattgttttactcctgttttcttataagagttttatagtttaaagcttttacatttagttctttgatccattttgagttaatttttgtgtgcgctgtaaggtagggatccagcttcattttcttttatgtggatatgtaattgttccagcaccatttgtttaaaaaaactgtggtcttggcattgttgttgaaaatcagttggccataggtgtatgggttatttctagagtctcaattctattccattgttatctgtatatccttgtgcctgcactataatgttttggttactgtagctttgtagtaagttttgaaattaggaagtgtgagtccagcacatagtagaaacttgatatatacgtattattgttttggtcaactcattcattgaatgaccaatttattcaacaaatagtttagtctcctcagtgccaggccctttgctgggttctgtggatgtgaatagaaattaaaataaggtggagtcatccaacagttacaactgggtgccatacgaattttactataaatatgtactggacactacactgactcagctgtaggaacagagtaggctgggaagcacctttgagatgaggccgtctggatgtaagagtctgtttctggcagcagagacctggagtgtgggaggcctgcttgctctgttagggtttgaactgtatcctgacgatcatgggaggcattggaggatttttaggcaggaaaatgatgtgaagggatttgcatttaaaagagattatttgggactgggcacagtggctcacgcctgtaattccagcactttgggaggcctagacaggcgggtcacctgaggtgggaagcttgagagcagcctgccaaaatggtgaaatcccatctctactaaaaatacaaaaattagccaggtgtggtggtgcacctgtaatcccagctactcaggaggctgaggcagaagaattgcttgaacctgggaggggaggttgctgtgagctgagatcgcaccactgcactccagcctgggtgacagagtgagactccatctcaaaacaaaataaataaataaataagagaataaaatagataatttgggcaacaggttgatgttaattccccacctttgttcttctccttcagtactgtgttggctggtctgaatcttttggcttttcatataaatttctgaaactgttgctatctgttctctgcctgttttatttttgttgttgttgtttggattttttgtttttttgagatagagtcttgctctgttgcccaggctggagtgcagtggtatgatctcagctcattgcaacctccccctctcaggttcaagcgattctcttgcctcatcctcctgagtagctgggattgcaggcatgcgccaccatgcccagctaatttttgtatttttagtagagatggggtttcactatgttggtgaggctggtgtcgaactcctgacctcatgatccacccgcctcggcctcccaaagtgctgggatgacaggcatgagccaccgtgtctggcctctctgcctgttttttaagacttttgtctttggagttttgcggtttctccactgtggttttccatatgaattttcttttatttcttctgcttaaaatttgtaggccagttggtcatggtggctcacgcccgtaatcccagtactttgggaggccgggtgggtggatcgcctgaggtcaggagtttgagaccagcctgaccaacatggagaaaccccatatctactaaaaatacaaaattagccgggcgtgatggtgcatgcctataatctcagatactcgggaggctgaggcaggcgaattgcttgaaccagggaggcggaggttgcggtgagctgagattaggccattgcactccagcctgggaaacaagagcgaaactccatctcaaaaaaaaaaaaataataataataattgtaggccttccttaagaaaaataaaataaaattctaggctgggcgcggtggctcctgcctgtaatcccagtactttgggaagctgaggcgggtggatcacctgagttaggagtttgagaccagcctggccaacatggtgaaaccccgtctctactaaaaatacaaagatgagccatttgtggtggcacccatctgtaatcccagctactcgggaggctgaggcaggagaattgctggaacccaggaggcagaagttgtagtgaaccgagatcatgccactgcactccagcctgggtgacagagcgagatgccatctcaaaaaaataaaatataaaataaaattctaagccctgcaaccaactgaatggagccctccccttggtcaagggaaccccagagaaaccttggaagcttgagttcctggccgtagcaggagaggaggtcagacgcgcctcactgtacccctccctccccagccaccattaggcttcttcactaagggctaaacagaaaccagcccttttcaaagactctacactgctaatgtggattactggtttatcttcccagatacagattaaagacaagatgagattaatggttccttcacccttccctgagaggtctgcttagttctcttcctctgtttccttctatcttaggtaaaatgtacatttactgggcacttactgaagtctcacaagtacgtaaccactcacctcacagccaccctccctctttgaaggaccacatgtaattactaaacctcctgagaacctcttgggacagaaacaagcacagatgtgccgtgactcatgtttttcctgtgggcaccctcaggctggctcagtagccctcacttgcttgagatcctgaatctgcgggttggcgtctttcatggttgctggatcatactctgccgttatctcttcggatatgagttgcccctagcccactatctggcccctctctttagggacctctgattgaacatacattagaccttctctctcctgctgttcctgatcactcttctgtcctgtaattgctgcttcttgtgctgcattctgggtaatttcttctggtcttttttccagtttactaatattgtattctgttataaggtccttccattgagtgtttctttctttcttttttcccaaacagcaactcaaaacagacattgagttttaattttggttcctgtactttttatttctagaagttctatttggttatttttcaagtctgctacattattacataattttttaataattttatatctttaatagatagttttttgttttgttttgttttgttttgttttttgagacagagtctcgctttgttgcccaggctggagtgcagtggtgcaatctcagctcacagcaacctccgcctcccaggttcaagtgattcccctgcctcagcctcccaagtagctgggattacaggcacgcatcaccacgcctggctaattttttgtgttttagtagagacagggtttcaccatgttggccaagacagtctcgatctcctgacctcgtgatctgcccacctcggcctcccgaagtcctgggattacagagctgagccactgcgcctggcctttgatagatatttcaagttcatcttttttttttgcttccttaatttttttttttgctataccccatgcctccaagataacagttttttctttttaatttaaatataatacagttttactgtgtatccaagaatatctgaaatctttcgtgggtctctttcttttgtcttttgtatctgttgctttttgctgggctgagcctgcttaaaacaagccccgttagctgtaaaggtttaccttagaaagtcaggtgtcttcctctgtaactctctcccttttccatctgctccaaggcatttatttatattaatcttgacgcaaagggaagttgtgtccacttcaccttggccagtaaggaagcagtgtttggcagatgttgttactcctaataatgccagccagtgagtgaagctgacctgaatgcctcccagggctgaggcaatggcatgatcaccgaagctcaaaccagagacagtttcacctttctgactgaatagtgttcggtgtaggccaaatgcctgcagactactgtttgaggactggtgtggtctaccaggtgtttccttagcgcctggatgtctctggctgccatcccagggatagagcatggtgttagatacgctagatgcctgccgaagtaattatgggtgaaacatatgatgtccaagatttgcttttaaaggctccaatacctcctcccagattccggagggctgtgaaacaattagctatgaaaactggtaattcctgaagctgggtacatgggggttcatgatccctctctcaccttttttgggggagaatgtttgagactttaataagaacttgttgccttttccttttacagggtgttgcaggcatcttcctcaggcctgttttctctgttttccaggctgacgtgatggcagacagggttccccgctgcccggtctgcaccggcgttgtgaagcccgacattgtgttctttggggagccgctgccccagaggttcttgctgcatgtggttgatttccccatggcagatctgctgctcatccttgggacctccctggaggtttgtcagcaggcctgtgcagggaggaggctggagggcaggggaagggaggggtacaggagtcatctcatgggctgtcggcaggcctgtgcagggaggagtctggagggcaggggaagggaggggtacaggagtcacctcatgggctgtcggcaggcctgtgcagggaggaggctggagggcaggggaagggaggggtacaggagtcatctcatgggctgtcggcaggcctgtgcagggaggaggctggagggcaggggaagggaggggtacaggagtcatctcatgggcccttccagggctggtgccactttgggaaggtgaatggattcagctggggttccaggctgagggagcagcagcctgtgcaggagacaggaaggtgggaagctgctgggctttggaggtggtataggtgtgggtggggcaccacgtgtgaggagaagggagaaggatgggggtgtgggggcgaggtggaggggcagggcctcccaggtcagatcaggaatactgatgctgcagtgggaggagtgataaatccacagggactggcccggggacgtagctgcacccttggggtcagggaggcctttggggagtggagagtggagcaagcagtgccaggaggctggtcctggagaaggtggagctgtggtcgcctgagggatggcgaggagggggactggactcgcagtctgtgatgttttggggacgtgagaaggaggcgtctggcttggtctgtaaggtcagggcacttgctggtgaggcgtgatttgggagggaggatgcccagctcggttctgtgtgtgtctgaggtgtcgggaaacatgccctggatgtgttcaagcagctgttctgcgtctgcgtctgcagctcaggaaattcctaaaagctgtgatgagagcaagaaatgagaccatgaagtcagtgtgtgcgtgactggatgtaggcaccgaggacagaagggccagaaagacctgtgctcagaggggcccagggcagccacaggggcccagagcatgtgtttgttcaggcattcattgtgtgctgggccctgctccagtgctttggacatacacggtcagatgtcagtgtaagaagttatatagtttgttaggagatgattgatgttatgagaaagataacaagtaggatagaaaggctagaagggttgggaaccagctgcagtgtcaagtcaggcaggtggagttggatctaagagtttaccgaggtgaggagggtctggcaggggacactgcacaggtgacaagcagcaaggagggtggggcgaagtcagcattgatggccacggggctggagcagagaagaaggtggggcacaagtgtcatctcatgggaggctggcgccacctcagaaggtgaatgggttcagcttgggttccaggccagagtctgaagttgagaggactccgttgggtgctgggctgtgagcccaccatgggggcaagactgggagcagcagacccagcagggcccttgtaggtaatcaccggctggcactggctgggggccaggtaaagccagcagaggctgaggggtgctggagtctgggtgtgtgtgaacgcagagtgggtacgctggcacagtgcatgggaggccgtggattcccaaggaccccagggctgtggctggagcagctggaaagacggagccgccgcttcctgagatggagaagcctggtaggtgggtttgggggagctcaggaactcagccttgtttccacggatttgaggatgtgctgcggactggaggtgttgagcaggtggacatgagtctggagtccaggaaggcccagaggcaggagctggggtgctggagtgagcagacaggagagcccagggtgtggacagacatgagaatgccatgctaggcctaggatggagggacagacacaggaggagcagtcagaggggccatggtggtcagcacagtgtgggctgagaccagctgaccgtgctggccaccaggtgtggacacttgggccaccagccatctttattgttgaagtgaaatgaaaatggcctttttcctgattataagtgtatcatgtgtgtctttgaaaagattcgtacattatataaagatataaagcaaaggatcaactttttaatcccaccaactgttagcattttattctgtgtcctctcagctttcttttttttgtacaaatgcatacgtacagatggtaattttaaactaaaagttggacagcactgtacattctattctgcagcctgctgttttcacgtaacaatgtgagtccatggagatgtgctgcgttgttaatgccaacagtttcccttacacggatatgaggtcccaactgagaaacccatgtctgtaaggctggtgccatcatgaactgaatgagctggtgtcacgcacagactctatctcatgtgctttgtggacgaaatgttaatgtgtttgactgtggagtaccactccagatcccctttaggtgtgacataacgtgggatgtaaaccatatgatcttttctaaaatctcaaaaattctgaaacatattcagccacaagagctttaacatagattttgtggatttaatacaaaatttatgtaagcaatttcttactgatggacaatgataataaatagtatataatttttacattaaaagtaatgctgggccaggcaccgtggctcacacctgttatcccagcactctgggaggccaaggcaggaagattgcctgaagctaggcatttgagaccagcctgggcagtatagtcagacctcgtctctacaaaaaataaaaagatagccaggcatggtctgtgtagttgcagctatttgagaggctgaggaaggaggattgcttgagcccaggaatttgaggttatagtgaactatgatcatgccactgcattccagcctgggtaacagaatgagatcccgtgctgtagtgaatatccctgtgtatcatccttatctactcatgcaagtactcctgaagggtaaatgctgtagtgaatatccctgtgtatcatccttatctacccatgcaagtactctggaagggtaaatgctgataaatactgagaacttgccttccggtgaatatccctgtgtgtcatccttatctacccatgcaagtactcctgaagggtaaatgctgtagtgaatatccctgtgtatcatccttatctacccatgcaagtactctggaagggtaaatgctgataaatactgagaacttgccttccggtgaatatccctgtgtgtcatccttatctacccatgcaagtactcctgaagggtaaatgctgtggtgaatatccctgtgtatcatccttatctacccatgcaagaactcctgaagggtaaatgctgataaatattgagaacttgccttccagaaagatgtaacaattacactgccacaaactgtgtttttatgtagccattttatcacatcctcaccaaaaccaaaatcacacaaatcaaattggttaaaaaatgcatgtgtgtgtgtggaggggggtgcggattttgcctttctgtagtaaagaatgaagttcatcttttcatgtttattgccagttgtgtttcttctctttggattgtatatttgtacctcttgaccatttttcattgggtcattataaattagcaatataaattagttttaattttagtataaattaaataatataattacattttaatgttaatataaacttctttcttttttttttttttttttttgagacagagtcttgctctgtctcccaggctggaggttcagtggcgcgatctcggctcactgcaacctccacctcccaggctcaagccattctcctgcctcaacctcccgagtagctcggattataggtgcgtgccaccacgcccagctaagttttgtatttttagtagagacgtggtttcactatgttggccaggctggtcttgaactcctgacctcagctgatctgcccgcctcggcctcccaaagtgctgggattataggtgtgaaccaccatgcccagctgttaatataaatttcattataaattagcattataaattagttcataaattatatgtttataaatgagtttatcaattagcaatataaactattgtcatatgttgtaaatatttttgcagtttatgatgatgagaggtttttaaaaattttaaattttctacatagtagttttatgtagataccgagataatagtatttacatagtcagatctgtcattttcctttgccttatctgacttcagtttttacgcctagaacgttcttccctatccttacttgtaaatccttagttttcttcaagaactgttttgtttacattgaaacctttaatccatttgaatttttttcagtgggaggtaggaatggagtattttcctcccagataatgagccagttttaatgccatttattaatgtatccatttttttaccttgttcctcttaaaagaagctttgagagctgtatgaagaagcctgatggcaccgagctaggcctctctagaggctgggtggggaagaccatggagagacgtaacagtaactcctgctcgggggcaccagctcgtctgggtgcccgatgctggtggtggctgtcagagcaagcagggctagccagaggagatggacgagtctgtgctgttgtccctctgcgtcatgctgggagacagcgaggtggggaggacagggagaacagaacgtgctcacaaagaggaggcaggaaggttggatccctgatgagccttggaacggaggtggggaaaagcaaggatgtgtggaaacagcaagaagtgggagagagagagagaggcggaggggagaaaaccgtcacggaggccaagcggcaggagctcagctgaagaaatgagattggtggtgggttttccctatatcgcaggctctgactgccaatctgctgctcctccaaggcctcggtggctgtggcatgaaacatcctgaggagcttgtaaagtggacactgtgcccctcacgtttggcccatttttcaggtggagccttttgccagcttgaccgaggccgtgcggagctcagttccccgactgctcatcaaccgggacttggtggggcccttggcttggcatcctcgcagcagggacgtggcccagctgggggacgtggttcacggcgtggaaagcctagtggagcttctgggctggacagaagagatgcgggaccttgtgcagcgggaaactgggaaggtacagactgctgaggaggaccatccaaggggctgcccttctcactgctctagggtatggtccacctgatatggagccccgttggttaacacagtaacagtaatagctgatgatgctgtgaatcctgcaccaggcactacctggacctgactgggtgttactttcaatacctccatttagagatgaggaaacagatgctaacaggccaagcagggacacggtccagacactcagggctgatgagtctgtattcttaacagactataggcgttaccttcactccctaaaataaagcagccaacagtgtccctctaaggcctggtatgtgattctaagatgatacgggttaaagaactttgagaagctaaagttctctgcatctatgtgggatgaaggctacatgagtgatgcttttcggaagtaattggtatgagagccattgatcaattataatccgctgaggaaagccaaagagccttgatgctttctaagagatttcaaaccgcctataaacaagtgaagttacagaaaatgcagtttcccataagaatcatgtagcatgtgtagccttgatattaagggttttcaatgggaggtggtagcattaagcatttaaagtccagtgtcatgattacaggcaggtgtaacactgtccaaaggggatttcaccagtgtattagtctgttctctggctgctcataaaggcatacctgagactgggtaatttataaaggaaagaggtttaatggactcacagttccatatggctgtgggggcctcacaatcatagtggaaggcaaagcaggagcaaagtactgtcttacaaggtggcaggcaagaggacgtgtgcgggggaactgccctttataaaactatcagatcttgtgagacttattcactatcagaagaagagtgtgggaaagacccgcccccatgattcagttacttccacttggccccacccttgacacatggggatgattacaattcaaggtgagatttgggtggggacacagccaaaccatatcaactacaatatatcacagttgatgctcctcttgccttccaaggcagatgtcttaggaaatcctgatcctttttccttgtccacagctgtggctgcctcatggctcagggccatggggtcagcactctcctcacctccaccagtccaagacctccaacctctggttgcaggctgattttttaccaatcatggtcacttcattatggaggcagggaacccagctaacaatgaggcttaaacgctgagaggcgagtgcctcctggccagctcacaaggcagcggagatcttagatcagcccagcaggcttttttgagggatccttttcctgctccaacttcatattttcttttttttgtaatggagtttcactcttgttgcccaagctggagtgcaatggcacgattttggctcactgcagccctgcctcctgggttcaagtgattctcctgcctcagcctcctgagcagctgggattacaggcatgtgccaccatgcctggctaatttctgtacttttattagagatgggatttcatcatgttagtcaggctggtctcaaactcctgacctcgggtgatccacctgcctcagcctcccaaagtgctgggattataggcatgagccagcaggcccggcccaacttcctgttttcatagaaaagcagattgtaactctggtagctcctgtggagttttggaagtggcttaataggatttgaactgtataatctagtttcagagaaatgtatgtaaaatgggttatgatttcattttctgttttttacagcattactatccaaggggttacttttccaaatagtgaatgcttttaagcacatgagcatcagtacatattgatttgggtactttaagacccatagaatgaggctctccatttagccaccctgttctgcccaggcctgctgggatcctcttagcccagcacagcagcagcagtatttgcagaaagcagcttgttttgtgaaatattttgcatgtctgcagctagagctgtttgaacagagatctgctggcctgcctgggtgtgtaaacagatagctgataccctctgtcttctgtattccagcttgatggaccagacaaataggatgatggctgcccccacacaataaatggtaacataggagacatccacatcccaattctgacaagacctcatgcctgaagacagcttgggcaggtgaaaccagaatatgtgaactgagtggacacccgaggctgccactggaatgtcttctcaggccatgagctgcagtgact

SEQ ID NO: 14009 - DNA, 1235 bp, Homo sapiens
aggactccttggactgcgcggaacatggcgttctggggttggcgcgccgcggcagccctccggctgtggggccgggtagttgaacgggtcgaggccgggggaggcgtggggccgtttcaggcctgcggctgtcggctggtgcttggcggcagggacgatgtgagtgcggggctgagaggcagccatggggcccgcggtgagcccttggacccggcgcgccccttgcagaggcctcccagacccgaggtgcccagggcattccggaggcagccgagggcagcagctcccagtttcttcttttcgagtattaaaggtggaagaaggtccatatctttttctgtgggtgcttcaagtgttgttggaagtggaggcagcagtgacaaggggaagctttccctgcaggatgtagctgagctgattcgggccagagcctgccagagggtggtggtcatggtgggggccggcatcagcacacccagtggcattccagacttcagatcgccggggagtggcctgtacagcaacctccagcagtacgatctcccgtaccccgaggccatttttgaactcccattcttctttcacaaccccaagccctttttcactttggccaaggagctgtaccctggaaactacaagcccaacgtcactcactactttctccggctgcttcatgacaaggggctgcttctgcggctctacacgcagaacatcgatgggcttgagagagtgtcgggcatccctgcctcaaagctggttgaagctcatggaacctttgcctctgccacctgcacagtctgccaaagacccttcccaggggaggacattcgggtggagccttttgccagcttgaccgaggccgtgcggagctcagttccccgactgctcatcaaccgggacttggtggggcccttggcttggcatcctcgcagcagggacgtggcccagctgggggacgtggttcacggcgtggaaagcctagtggagcttctgggctggacagaagagatgcgggaccttgtgcagcgggaaactgggaagcttgatggaccagacaaataggatgatggctgcccccacacaataaatggtaacataggagacatccacatcccaattctgacaagacctcatgcctgaagacagcttgggcaggtgaaaccagaatatgtgaactgagtggacacccgaggctgccactggaatgtcttctcaggccatgagctgcagtgact

SEQ ID NO: 14010 - DNA, 4931 bp, Homo sapiens
aaaaccaggcttgaggacatcacaaccccaaggggctgtgcctccttccaggagtcctgccaagcccagaagttgtgctcttggccttgcgtgctcatctcggaggcggcagcaacacttcgctttggcttgaatttcagtgtcgggcatccctgcctcaaagctggttgaagctcatggaacctttgcctctgccacctgcacagtctgccaaagacccttcccaggggaggacattcgggtgagttatcctgctgttggttgtccttctgcagtttgctgttggggtgatctggaaaagtggtattttataagcattgtctcgaaaggacagttgaacaataatagtgtgaaacattttatttgtaaattagaaaatcaatacatgcttgtaaaaaaatttaagacaatatagaaatatgtagggaaaatgaatctcccttcagccaattccagctgcccactttttttttttttttttgagattgagtctcactctgtcgcccaggctggagtgcagtgggcgatctcggctcactgcaacctccgtctcccggattcaaggaattcttctgcctcagcctcctaagtagctgggattacaggcgtgagccaccacgcccggcaatcagatggccttttgtgccgagcttatttcctgaaaatgtttctcgctccttcgccttgtagcttgtgttagtatttcatcctgtttcatggctaaatgttccactgatgtatgcaccacagttggtttgtttgtacatggatgggtgtttgggttgtcccacctttctgctcttgtgtatagttctgctgtggagcatatgcaagtattcgtttgagagtccttgttttttattcttttgagtatgatacctacaagtattgctgggtaactccacgtttagctatatttatttatttattttttgagacacagtcttacactgtcacccaggctggagtgcaatggcgcgatttcggctcaatacaacctctgcctcccgggttcaagcgattctcctgcctcagcctcctgagaagctgggattacaggtgcctgccaccatgcccagctaatgttttttgtatttctagtagagatggggtttcaccatgttggccaggctgctcttgcattcctgacctcaggtggttcacccgcctcggcctcccaaagtgctaagattacaggcgtgagccaccatgccctgcccatgtttaacttttttgtttgtttgttttgagacggagtctagctcttatcaccaggctggagtgcagtggcgcaatctcggctcactgtaccatccgcctcctgggttcaagcgattctcctgcctcagcttcctgagtagctgggactacaggcacacaccaccacgcccggctaatttttgtatttagtagagtagtttcaccatgttggccaggatgtctcgatctcttgacctcgtgatccgcctgcctctttctcccaaagtgtgggattacaggcgagagccactgcgcccggcccgttttaactttttgaggaacgaatatactgttatctgcagaagctggaccattttacattccaccaacagtgggcaagggtttcatcttttccacatcccaacacttactttccattttttaattacagctatcccagtgggtgggaggtggtaacccactgtagcactgattggcattttcctaatgattcatgatatcaaacatctttccatgtgctttttggccatttgtatatctttggagattgaagtcctttgcgcattgtttaattgtgttgtcttttttattgttaagagagtcctttatatattctggaagctagatccttatcagagacatgatttgcaaatattttctgtcattctgtaggttgtcttttttactttgttgatgtcttttgatgcatagaagttttgattttgatgaaatctagtttgtctatttattttctcactcttttggaatcatatctgagaaatggtattgttttactcctgttttcttataagagttttatagtttaaagcttttacatttagttctttgatccattttgagttaatttttgtgtgcgctgtaaggtagggatccagcttcattttcttttatgtggatatgtaattgttccagcaccatttgtttaaaaaaactgtggtcttggcattgttgttgaaaatcagttggccataggtgtatgggttatttctagagtctcaattctattccattgttatctgtatatccttgtgcctgcactataatgttttggttactgtagctttgtagtaagttttgaaattaggaagtgtgagtccagcacatagtagaaacttgatatatacgtattattgttttggtcaactcattcattgaatgaccaatttattcaacaaatagtttagtctcctcagtgccaggccctttgctgggttctgtggatgtgaatagaaattaaaataaggtggagtcatccaacagttacaactgggtgccatacgaattttactataaatatgtactggacactacactgactcagctgtaggaacagagtaggctgggaagcacctttgagatgaggccgtctggatgtaagagtctgtttctggcagcagagacctggagtgtgggaggcctgcttgctctgttagggtttgaactgtatcctgacgatcatgggaggcattggaggatttttaggcaggaaaatgatgtgaagggatttgcatttaaaagagattatttgggactgggcacagtggctcacgcctgtaattccagcactttgggaggcctagacaggcgggtcacctgaggtgggaagcttgagagcagcctgccaaaatggtgaaatcccatctctactaaaaatacaaaaattagccaggtgtggtggtgcacctgtaatcccagctactcaggaggctgaggcagaagaattgcttgaacctgggaggggaggttgctgtgagctgagatcgcaccactgcactccagcctgggtgacagagtgagactccatctcaaaacaaaataaataaataaataagagaataaaatagataatttgggcaacaggttgatgttaattccccacctttgttcttctccttcagtactgtgttggctggtctgaatcttttggcttttcatataaatttctgaaactgttgctatctgttctctgcctgttttatttttgttgttgttgtttggattttttgtttttttgagatagagtcttgctctgttgcccaggctggagtgcagtggtatgatctcagctcattgcaacctccccctctcaggttcaagcgattctcttgcctcatcctcctgagtagctgggattgcaggcatgcgccaccatgcccagctaatttttgtatttttagtagagatggggtttcactatgttggtgaggctggtgtcgaactcctgacctcatgatccacccgcctcggcctcccaaagtgctgggatgacaggcatgagccaccgtgtctggcctctctgcctgttttttaagacttttgtctttggagttttgcggtttctccactgtggttttccatatgaattttcttttatttcttctgcttaaaatttgtaggccagttggtcatggtggctcacgcccgtaatcccagtactttgggaggccgggtgggtggatcgcctgaggtcaggagtttgagaccagcctgaccaacatggagaaaccccatatctactaaaaatacaaaattagccgggcgtgatggtgcatgcctataatctcagatactcgggaggctgaggcaggcgaattgcttgaaccagggaggcggaggttgcggtgagctgagattaggccattgcactccagcctgggaaacaagagcgaaactccatctcaaaaaaaaaaaaataataataataattgtaggccttccttaagaaaaataaaataaaattctaggctgggcgcggtggctcctgcctgtaatcccagtactttgggaagctgaggcgggtggatcacctgagttaggagtttgagaccagcctggccaacatggtgaaaccccgtctctactaaaaatacaaagatgagccatttgtggtggcacccatctgtaatcccagctactcgggaggctgaggcaggagaattgctggaacccaggaggcagaagttgtagtgaaccgagatcatgccactgcactccagcctgggtgacagagcgagatgccatctcaaaaaaataaaatataaaataaaattctaagccctgcaaccaactgaatggagccctccccttggtcaagggaaccccagagaaaccttggaagcttgagttcctggccgtagcaggagaggaggtcagacgcgcctcactgtacccctccctccccagccaccattaggcttcttcactaagggctaaacagaaaccagcccttttcaaagactctacactgctaatgtggattactggtttatcttcccagatacagattaaagacaagatgagattaatggttccttcacccttccctgagaggtctgcttagttctcttcctctgtttccttctatcttaggtaaaatgtacatttactgggcacttactgaagtctcacaagtacgtaaccactcacctcacagccaccctccctctttgaaggaccacatgtaattactaaacctcctgagaacctcttgggacagaaacaagcacagatgtgccgtgactcatgtttttcctgtgggcaccctcaggctggctcagtagccctcacttgcttgagatcctgaatctgcgggttggcgtctttcatggttgctggatcatactctgccgttatctcttcggatatgagttgcccctagcccactatctggcccctctctttagggacct

SEQ ID NO: 14011 - DNA, 561 bp, Homo sapiens
aaaaccaggcttgaggacatcacaaccccaaggggctgtgcctccttccaggagtcctgccaagcccagaagttgtgctcttggccttgcgtgctcatctcggaggcggcagcaacacttcgctttggcttgaatttcagtgtcgggcatccctgcctcaaagctggttgaagctcatggaacctttgcctctgccacctgcacagtctgccaaagacccttcccaggggaggacattcgggtaaaatgtacatttactgggcacttactgaagtctcacaagtacgtaaccactcacctcacagccaccctccctctttgaaggaccacatgtaattactaaacctcctgagaacctcttgggacagaaacaagcacagatgtgccgtgactcatgtttttcctgtgggcaccctcaggctggctcagtagccctcacttgcttgagatcctgaatctgcgggttggcgtctttcatggttgctggatcatactctgccgttatctcttcggatatgagttgcccctagcccactatctggcccctctctttagggacct

SEQ ID NO: 14012 - DNA, 10577 bp, Homo sapiens
agctgctgtggctccaggatgatggagacagagcgacttggtgagggggaggggagggaaatggaacggagtagccgatatggaatgaactttgacccctgacttttgacctttccccgtagtgctaccccctccagatcccctggacctaccccttcgggccgtggagctcggatgcacggggcactgggagctgctgaacttgcctggagctccagagagtagcgtgagtgacttttgaccctaacctttgacccgcattgagtccaaacctccttcaccctcctcacagtaggatctagcttaaccttgttcatctgtgcctgtactcctgtccatcccagcctgaaggggtgctggacagattacagcccagtgtacctgcagtacatgtgaggacagagcagaaagggctggggatatttttgctttgagagctgctctttcaaatgtggcatttctccgtggagctcccttctgtatccaagcaccagggcacttggtgactgagatgataggctttgagcctccaacctttcatccttaggtctgggacccctttttctaaaatcagtgagtctccaatttcagtgtgcttcatgattagccagggagctttttaaaaatgcacattcctaggtccagcctccatgtttctgaaatccaaaatctgccccaggtaattcagtagcaggtagtttttggccaagcctgattgtcctagtctgtttgacacatctgccatttctgatctgaacacaagtcccatcatctcttttgtctgcattttatcctctttccttacctaatgcctctcatcttgcccttgtttcagcttccccatggcctccctccttgtgccccagatctgcagcaagaagcagaacagttgtttctgtcatccccagcctggctgcctctgcatggtgtggagcactcagcccggtgaggagtctggaggggcttagactagggtgatgggttcctgaaggaagctgggacagaggaagaaagaagacccaaaagttactatttttctctccagaaaatggcagaggaagacggatccctggtctcttttggctgtcctgggagccccagtcccatccgacctacaggcccaaagacacccaaccacaggccagatactgggttacaaagaggtaggaggtcaggggtcatgagaaacagttggggagaaggggaggtggtcagagacaagctcagcctcattggggctctgatctcttgccttaggtcttgctggagaacacaaatctctcggctacaacctccttgtctcttcgccggcctccagggccagcctcccagtccttatggggaaatccaactcagtatcccttctggccaggtgactcttgtggagatgggatggtagaagagggtgtctttaatctccagggaagggttccccacctatctcgtattaccctcatcccatgaatccctgtctgtcctgtctcttcccaggggggatggatgaacccaccataacagatctgaacacacgggaggaggctgaggaggagatagactttgagaaaggtaaggtggggctctgagtctgagccttgaggaggaagagcccaggctatcactgggctactgctagccctcccatgtttttgagaaaattagaaaaagatattctgtccataacaacctttactgtcatctgctgggaaatttctacaacaacctttactgtcatctgttgggaaagtgtcatagcaaacatccctatctacagcatctgtcctgtaaatggtatcttttaggtttatataatgtacacaatttgttcaccagtgtgcagtgacctgatttcatgtccctatcctacagatcttcttactattccacctggtttcaagaaaggcatggactttgcaccaaaaggttagttttagtttttgagtggggtgtaggagaagtcatgtccttctcctaaggaacagagatggacatgacaaggttgaccttgttggcttgctcctcagattgtccaactccagctcctggactactaagccttagctgtatgttggagcctctggatttgggtgggggtgacgaggatgagaatgaggcagtgggacagccaggaggtcccagaggggacactgtttcagcctctccctgcagtgctcccctggcccgagcaagcagcttggaagacctagtgttgaaggttggtggttctgtgtagtggaggcaagaaagagccttgccaccaggatgtgggctggctaggatgggtctgaggggaagaaagggacatcttttgggaggagtgctaattgagagccctctggttgtatctttatcactgctacccctgactcttccaggaagcgtccacagctgtatccaccccagaggccccagagcctccatctcaggagcagtgggccatccctgtggacgccacctcccctgttggtgatttctatcgcctcattccccagccagccttccaggtactttggccccatcttcacacgctcctctacctctttctgggtcacactcccagccgaccccttgtctcctctattggccagaggtcagatccatcccaggccagtcttggtactcagtcccagcctcggctggctccggccttcatccgcccgccctgcgtgctccatgagcaggaggcagcaaggccccgctcctttcttcagctcctgtctatttctctctcccatagtgggcatttgagccagatgtgtttcagaaacaggccatcctgcacttggaacggcatgactctgtctttgtcgcagctcacacatctgcaggaaaaacagttgtggctgaatatgccattgccctggcccagaaacacatgacacggtatgagttcctttgccaacctcccccttcaccagccagccccattttctcctgcatcctttgaaaatctcatctcttcccccacctctctagctcatcctttaagtgagaggttcagggctaagactgagacaagagcccagagagaaatgaaaagacatggtggggagaaagtttagaagaatgacctgggttagtttaggaaggggttggggacagaatttttctggggttatatcatgcaggagaatgtaagggcagtttgggtgaagaagaggagcacctgagcttctggggcatgcttccacgagggctccatgtgggagaggaagtgcgggccatgagtctgcggagggactggctaacttcatgctctcttcccagcaccatctacacttcgcccatcaaggccctgagcaaccagaagttccgggacttccgaaacacattcggggatgtggggctgctcaccggggatgtacagctgcatccggaggcctcctgcctcatcatgaccacagagatccttcggtgagagatggacactcaatacaggggagttttggctgggaagatgtggccgttgtggagagtgtgctgtctgaggagggggtggagacgagccactggggagtcaatccttggcctcttctccccagctccatgctgtacagtggctcagatgttattcgggacctggagtgggtcatctttgatgaggttcactatatcaacgatgtcgaggtaagggccatgggctccccagaacccggcagtcctctcctttgggaccagttgagcgtctcccttattccacacactcagggccccttactgctttctttacccccatatggaatcctgtgcctctttatgggcagaagggcggcccctgccctcatgtgacctcccttccctctctgtgcccagcgtggggtcgtgtgggaggaggtgcttatcatgctacctgaccacgtttctatcatccttctgagtgccaccgtccccaacgcccttgagtttgctgactggattgggtgagacgtgtgtcccgggttgcctgggtgaagggggctacagtactccttgattcgggtgggggactaagtctaccacagcaaggagagcggtcaggccttaggggtgatgctggggaacatgtcccacctggtggctgtgggatcccctttgggtccagattactttgcatgttgaaatgggatgagatgttgggggatagccttccattctgggtctcagaaaagactgggtaaagttggaggggtagggaagggggtggggatgtgggttccttcccacgttcccacccctgacctgcttccctctcctttcttcaggcggctgaagcgtcgtcagatctatgtgattagcactgtaacccgccccgtgcccctggagcactatcttttcacagggaacagctccaagacccagggggagctctttttgttgctggactcccgaggagccttccatacaaaagggtaagcctcgagatgggggaaagagttagggctgggcccccagctggacattgtggctacccctccctgtgccccaggtactatgcagctgtggaggccaagaaggagagaatgagcaaacacgcccagacctttggggccaagcagcccacacatcaggggggccctgcacaggtgagaactgggagggttttgtacctgccagcacctgtttttcctcctatcttttttttccccttgtcccccaggggttttgacttgagctttgagcactgccccagttaacactagctcacctctcattggttcaggaactcaacctctgctccttccccttccccttccttctccaggaccgcggagtgtacctgtccctcctggcctccctccgcacacgtgcccagttgcccgtggtggtgttcaccttctcccggggccgctgtgatgagcaggcctcaggcctcacctcccttgacctcaccaccagttcggagaagagcgagatccacctcttcctgcagcgctgccttgctcgcctccgtggctctgaccgccagctgccccaggtgcgtctgtgtgcgtctgtgtgcgtgcatgcacacatttggcagactggtggggatagggtgttccgagactccatccctgaccatgggcctcctcccaccaaaggtcctgcacatgtcagagctcctgaatcgcggcctgggtgtgcaccatagcggcatcctgcccatcctcaaggagatcgtggagatgctcttcagccgtggcctggtcaaggtgcatgtggtggtggaaagggactcctcagggtgcttgttgcccacttaggggctgcccagagggcagaggggcagaggtttaggcaggccagtgctgtggttaagaatctgggctctggattcagactacctgggtttgaatcccaggtacaccatgtattcacagtatcatcctggaccaattatttaaccttcctgaactttaggtttcccatcttaaaatggggatgcataagatatgaatacgtaggtctcagaaaagaaacccaggaagctagcaagcattcgaaaagttattagtaatcagaaatatacaaattgaagtactcacaagatacgactttacagctattagactggtaaaatttaggaaactagttcatgccgagtgttgccagagatataggaggttgtagggttctgggaatcctttacgggatgcctagccagtttggaatgcacgctggcactatttagacaaaataactatattggccgggcatggtggctcacacctgtaatcccagcactttgggaggctgaggtgggtggatcacaaggtcaagagatcgagaccatcctggccaacatggtgaaaccctgtctctactaaaaatacaaaaattagctgggcatggtggcaggtgcctgtagtcccagctacttgggaggctgaggcaggagaattgcttgaacccaggaggcagagattgcagtgagccaagatagcaccgctgcactccagcctgggcaacagagggagactccatctcaaaacaaaaacaaacaaagaaacaaacaaaaactatatcatactctgagcttatatttcattcctgggtatatatcacaaagaaattctcaccctggtctgtgagagaacatgtacacccatcctttgtttgtggtggcatggtgttggtagtaccagggtgcccttcactgggagagagggaaggttagtgtgggggatgcacccatagagtgttctgcagcagttggaagcagtgggttagatgtggccacaggaacatggacagatgttgaaacactaggtggagaaaaagaagcaaaaaaaaatcagatatataaccactttttatatgaattataaactacaagctcacaaaagaagacatgttctataagatcatatttatataaaaagatatttgttggatacattggaatgattgcagtcagggatgggaatgggatatgaaggtaaaagttaagaaatagaaataagtagctacataagtaaaatgaggaaaacaataatacctgccctatagatttgcctggagagttcagtgagatcccataagtaacaactgggatggtgccttatgcctacaaagtaaggtgggcttggccagggctgggggtgtgtgtatgtagagcctttgctgatcctttctgttctcctctgtcccaggtcttgtttgccacagagacctttgccatgggagtaaacatgcctgctcgtacagtagtgtttgactccatgcgcaaacacgatggctccaccttccgggacctgctccctggggagtatgtgcagatggcaggccgggcagggcggaggggcctggaccccacaggcaccgttatcctgctctgcaagggccgagtgcccgagatggcagacctgcaccgcatgatgatggtgagcgggccagcatgctcggcagggccccagctccaggaccttgctggattctgtcttcgattctcctctcttctttttcttcttccttttttttttggagacagggtcttgctctgttacctaggctggagtgcagtggcacaatctcgggtcaccgcaacctctgccttccaggctcaagggatcctcccacctcagcctcccaagtaggtgggattccaggcacatgccacacaggcctggctaattttttttttttttttatgctttgtagagatgaggttttgctatgttgcacaggttggtcttgaacttctgggctcaagcagtctgtctgcctcagcttcccaaagtactgggattataggtgtgggccacagcgcccaacttcctccgacttttttgttttgcctgggagaagctgaggtaggagtgagtgaatccaaggatgagattggagcccatctcttccagttttctcccatgtgaatatggagctagatggggcctttgagtccatttatttcagtttgctcccttatgttacagaagaggtgagcaagtggtttgtccaaggccccatggttgcagagctaggaccggatctgacgggagtaggcccagtccagaagactggctggggttcagtaggtcccaccctgatctcagtgacttctgtgacctgactccaggggaagccgtcccagctgcagtcccagttccgcctcacgtacactatgatcctcaacttgctgcgagtggatgccctcagggtggaggacatgatgaagaggagcttctctgagtttccctcccgcaaagacagcaaggtaaggagcctggggtaaccagtgtgtggagcaggaggttggccaaagacaggctgggaataggtaggcatccagaggccagtgtgttgagggtggggagtgtgacagattgggcctggagactcccctttcacagcttcccctgctcccacccaaggcccatgaacaggccctggctgaactgaccaagaggctgggagctttggaggagcctgacatgactggccaactggtcgacctgcctgaatattacagctggggggaggaactgacagagacccagcacatgatccaggtgagcaagtgtgagtgctgaggaggtgataggagaagggaagagaagatcgtgttactctaggtgctactaaacttagtccaagtgtctgtccctgtgatgcctcctcccatctgtcctttgctcttcagcgacgcatcatggagtctgtgaacgggctgaagtctctctcagcaggaagggtggtggttgtgaagaatcaggagcatcacaacgcattgggagtgatcctacaggtgagggtgatgggaatttggactccagagggtgggagggagcaagccctctctccattttccccacttggccagggcaggttgcgtcatcatagggccctcattttcccctcttgccctccttttcaccctctcccttcccatcaccacatcatgctcactccttcctcccaccaccccaagaagtctgctctgatcgcttgacttggttgcccctctctactggtgagctctgcatggttgcttcctgattcctgcccaagggtgggtatctggtctctgcctttgatgtctactcatcacacccccctctcctggcctctctgaccacccccaggtctcctcgaactccaccagcagagtattcacaaccctggtcttgtgtgataagcccttgtcccaggacccacaggacagggggccagccactgcagaggtgccctatccagatgacctcgtgggattcaagctgttcctgcctgaaggtgagagtgtggcagatgtctgttttctgccagcagtataagcaggatgcctgggtccatggcaatgtctgccctgctctccccttttcacagggccttgtgaccacaccgtggtcaagctccagccaggagatatggctgccatcaccaccaaggtgctccgggtgaatggggagaagatcttggaggacttcagcaagaggcagcagccaaaattcaagtcagagatgctagggaggcccttctcctccagaggggcacgtagaggcagggaggggcagtggtctgggagtttcctccagcctgagggagaccatgaagtggtggggttgtagtgagggggctcccccagcctaagggagactgtgaagtggaggttgtagtaagagggcttccacagcctgagggaggcttctgggggagagaagatcttaccccagatcttaagatctgctccctcttcaggaaggatcctccccttgcagccgtgaccactgctgtccaggaactgctgcgtctggctcaggcccacccagccggacctcccaccctcgaccctgtcaatgacctgcagctcaaagatatgtcagttgtagagggtgggctccgggcccggaagctggaggagctgatccagggggctcagtgtgtacacagcccccgttttcctgcccaggtaggaccctgggtggtaactcccaagctgggagtaggggcttttcctctgtggtcccctgtagactgaccgcccccatctcagcccttgtcctcagtgcacccctgctaaggggcaaggagaaggctgacgggtggctctctgcagtacctgaagctgcgggagcgaatgcagatacagaaggagatggagcggctgcgcttcctactgtcggatcagtcattgctgctgcttcctgagtaccatcagcgagtagaggtgggtggggcagtggttggggcaggggggctaggggacagcagtgtgtccaatgcccaccctttttcttgcaggtgctccgaaccctgggttatgtggacgaggcgggcactgtgaagctggcagggcgggtggcttgtgccatgagcagccatgagttgctcctcactgagctcatgtttgacaatgcactgagcaccctgcggcctgaggagattgctgccttgctctctggcctggtctgccagagccctggggacgctggggatcagctcccaaacaccctcaagcaggtaggggacaccacccctttctccctgccagggctgtggcattcctgaccttcaccttcaggtagtcccccaggtgaccccctccagccctgtaagtgccccaaggatggaaaatggctgccttcttgatctggtccttccctgtcctggagcaggaaggcaggccttaacctctccttctttcctgcagggaatagaacgtgtccgggctgtggccaagcggattggtgaggtccaggtggcttgtggcctgaaccagacggtggaggaatttgtgggggagctgaattttgggctggttgaggttgtatatgagtgggcccggggcatggtgagtacctgaggtttgggattttgcagacggctggctggggagaacctgcccaggctgagtgcatccagtcctcaccctactttccccacagcccttctccgagttggcagggctctcagggacccctgagggcctggtggtccgctgcattcagcgcctggctgagatgtgtcgctcactgcggggggcagcccgcctggtaggagagcctgtgctgggtgccaagatggagacagcggctaccttgctacggcgggacatcgtatttgcggccagcctctacacccagtgaatgccccatgtaaaaacatgatgataaaacagcaaa

SEQ ID NO: 14013 - DNA, 3795 bp, Homo sapiens
agctgctgtggctccaggatgatggagacagagcgacttgtgctaccccctccagatcccctggacctaccccttcgggccgtggagctcggatgcacggggcactgggagctgctgaacttgcctggagctccagagagtagccttccccatggcctccctccttgtgccccagatctgcagcaagaagcagaacagttgtttctgtcatccccagcctggctgcctctgcatggtgtggagcactcagcccgaaaatggcagaggaagacggatccctggtctcttttggctgtcctgggagccccagtcccatccgacctacaggcccaaagacacccaaccacaggccagatactgggttacaaagaggtcttgctggagaacacaaatctctcggctacaacctccttgtctcttcgccggcctccagggccagcctcccagtccttatggggaaatccaactcagtatcccttctggccaggggggatggatgaacccaccataacagatctgaacacacgggaggaggctgaggaggagatagactttgagaaagatcttcttactattccacctggtttcaagaaaggcatggactttgcaccaaaagattgtccaactccagctcctggactactaagccttagctgtatgttggagcctctggatttgggtgggggtgacgaggatgagaatgaggcagtgggacagccaggaggtcccagaggggacactgtttcagcctctccctgcagtgctcccctggcccgagcaagcagcttggaagacctagtgttgaaggaagcgtccacagctgtatccaccccagaggccccagagcctccatctcaggagcagtgggccatccctgtggacgccacctcccctgttggtgatttctatcgcctcattccccagccagccttccagtgggcatttgagccagatgtgtttcagaaacaggccatcctgcacttggaacggcatgactctgtctttgtcgcagctcacacatctgcaggaaaaacagttgtggctgaatatgccattgccctggcccagaaacacatgacacgcaccatctacacttcgcccatcaaggccctgagcaaccagaagttccgggacttccgaaacacattcggggatgtggggctgctcaccggggatgtacagctgcatccggaggcctcctgcctcatcatgaccacagagatccttcgctccatgctgtacagtggctcagatgttattcgggacctggagtgggtcatctttgatgaggttcactatatcaacgatgtcgagcgtggggtcgtgtgggaggaggtgcttatcatgctacctgaccacgtttctatcatccttctgagtgccaccgtccccaacgcccttgagtttgctgactggattgggcggctgaagcgtcgtcagatctatgtgattagcactgtaacccgccccgtgcccctggagcactatcttttcacagggaacagctccaagacccagggggagctctttttgttgctggactcccgaggagccttccatacaaaagggtactatgcagctgtggaggccaagaaggagagaatgagcaaacacgcccagacctttggggccaagcagcccacacatcaggggggccctgcacaggaccgcggagtgtacctgtccctcctggcctccctccgcacacgtgcccagttgcccgtggtggtgttcaccttctcccggggccgctgtgatgagcaggcctcaggcctcacctcccttgacctcaccaccagttcggagaagagcgagatccacctcttcctgcagcgctgccttgctcgcctccgtggctctgaccgccagctgccccaggtcctgcacatgtcagagctcctgaatcgcggcctgggtgtgcaccatagcggcatcctgcccatcctcaaggagatcgtggagatgctcttcagccgtggcctggtcaaggtcttgtttgccacagagacctttgccatgggagtaaacatgcctgctcgtacagtagtgtttgactccatgcgcaaacacgatggctccaccttccgggacctgctccctggggagtatgtgcagatggcaggccgggcagggcggaggggcctggaccccacaggcaccgttatcctgctctgcaagggccgagtgcccgagatggcagacctgcaccgcatgatgatggggaagccgtcccagctgcagtcccagttccgcctcacgtacactatgatcctcaacttgctgcgagtggatgccctcagggtggaggacatgatgaagaggagcttctctgagtttccctcccgcaaagacagcaaggcccatgaacaggccctggctgaactgaccaagaggctgggagctttggaggagcctgacatgactggccaactggtcgacctgcctgaatattacagctggggggaggaactgacagagacccagcacatgatccagcgacgcatcatggagtctgtgaacgggctgaagtctctctcagcaggaagggtggtggttgtgaagaatcaggagcatcacaacgcattgggagtgatcctacaggtctcctcgaactccaccagcagagtattcacaaccctggtcttgtgtgataagcccttgtcccaggacccacaggacagggggccagccactgcagaggtgccctatccagatgacctcgtgggattcaagctgttcctgcctgaagggccttgtgaccacaccgtggtcaagctccagccaggagatatggctgccatcaccaccaaggtgctccgggtgaatggggagaagatcttggaggacttcagcaagaggcagcagccaaaattcaagaaggatcctccccttgcagccgtgaccactgctgtccaggaactgctgcgtctggctcaggcccacccagccggacctcccaccctcgaccctgtcaatgacctgcagctcaaagatatgtcagttgtagagggtgggctccgggcccggaagctggaggagctgatccagggggctcagtgtgtacacagcccccgttttcctgcccagtacctgaagctgcgggagcgaatgcagatacagaaggagatggagcggctgcgcttcctactgtcggatcagtcattgctgctgcttcctgagtaccatcagcgagtagaggtgctccgaaccctgggttatgtggacgaggcgggcactgtgaagctggcagggcgggtggcttgtgccatgagcagccatgagttgctcctcactgagctcatgtttgacaatgcactgagcaccctgcggcctgaggagattgctgccttgctctctggcctggtctgccagagccctggggacgctggggatcagctcccaaacaccctcaagcagggaatagaacgtgtccgggctgtggccaagcggattggtgaggtccaggtggcttgtggcctgaaccagacggtggaggaatttgtgggggagctgaattttgggctggttgaggttgtatatgagtgggcccggggcatgcccttctccgagttggcagggctctcagggacccctgagggcctggtggtccgctgcattcagcgcctggctgagatgtgtcgctcactgcggggggcagcccgcctggtaggagagcctgtgctgggtgccaagatggagacagcggctaccttgctacggcgggacatcgtatttgcggccagcctctacacccagtgaatgccccatgtaaaaacatgatgataaaacagcaaa

SEQ ID NO: 14014 - DNA, 3658 bp, Homo sapiens
acttccgggctgccaggcagctgctgtggctccaggatgatggagacagagcgacttggtgagggggaggggagggaaatggaacggagtagccgatatggaatgaactttgacccctgacttttgacctttccccgtagtgctaccccctccagatcccctggacctaccccttcgggccgtggagctcggatgcacggggcactgggagctgctgaacttgcctggagctccagagagtagcgtgagtgacttttgaccctaacctttgacccgcattgagtccaaacctccttcaccctcctcacagtaggatctagcttaaccttgttcatctgtgcctgtactcctgtccatcccagcctgaaggggtgctggacagattacagcccagtgtacctgcagtacatgtgaggacagagcagaaagggctggggatatttttgctttgagagctgctctttcaaatgtggcatttctccgtggagctcccttctgtatccaagcaccagggcacttggtgactgagatgataggctttgagcctccaacctttcatccttaggtctgggacccctttttctaaaatcagtgagtctccaatttcagtgtgcttcatgattagccagggagctttttaaaaatgcacattcctaggtccagcctccatgtttctgaaatccaaaatctgccccaggtaattcagtagcaggtagtttttggccaagcctgattgtcctagtctgtttgacacatctgccatttctgatctgaacacaagtcccatcatctcttttgtctgcattttatcctctttccttacctaatgcctctcatcttgcccttgtttcagcttccccatggcctccctccttgtgccccagatctgcagcaagaagcagaacagttgtttctgtcatccccagcctggctgcctctgcatggtgtggagcactcagcccggtgaggagtctggaggggcttagactagggtgatgggttcctgaaggaagctgggacagaggaagaaagaagacccaaaagttactatttttctctccagaaaatggcagaggaagacggatccctggtctcttttggctgtcctgggagccccagtcccatccgacctacaggcccaaagacacccaaccacaggccagatactgggttacaaagaggtaggaggtcaggggtcatgagaaacagttggggagaaggggaggtggtcagagacaagctcagcctcattggggctctgatctcttgccttaggtcttgctggagaacacaaatctctcggctacaacctccttgtctcttcgccggcctccagggccagcctcccagtccttatggggaaatccaactcagtatcccttctggccaggtgactcttgtggagatgggatggtagaagagggtgtctttaatctccagggaagggttccccacctatctcgtattaccctcatcccatgaatccctgtctgtcctgtctcttcccaggggggatggatgaacccaccataacagatctgaacacacgggaggaggctgaggaggagatagactttgagaaaggtaaggtggggctctgagtctgagccttgaggaggaagagcccaggctatcactgggctactgctagccctcccatgtttttgagaaaattagaaaaagatattctgtccataacaacctttactgtcatctgctgggaaatttctacaacaacctttactgtcatctgttgggaaagtgtcatagcaaacatccctatctacagcatctgtcctgtaaatggtatcttttaggtttatataatgtacacaatttgttcaccagtgtgcagtgacctgatttcatgtccctatcctacagatcttcttactattccacctggtttcaagaaaggcatggactttgcaccaaaaggttagttttagtttttgagtggggtgtaggagaagtcatgtccttctcctaaggaacagagatggacatgacaaggttgaccttgttggcttgctcctcagattgtccaactccagctcctggactactaagccttagctgtatgttggagcctctggatttgggtgggggtgacgaggatgagaatgaggcagtgggacagccaggaggtcccagaggggacactgtttcagcctctccctgcagtgctcccctggcccgagcaagcagcttggaagacctagtgttgaaggttggtggttctgtgtagtggaggcaagaaagagccttgccaccaggatgtgggctggctaggatgggtctgaggggaagaaagggacatcttttgggaggagtgctaattgagagccctctggttgtatctttatcactgctacccctgactcttccaggaagcgtccacagctgtatccaccccagaggccccagagcctccatctcaggagcagtgggccatccctgtggacgccacctcccctgttggtgatttctatcgcctcattccccagccagccttccaggtactttggccccatcttcacacgctcctctacctctttctgggtcacactcccagccgaccccttgtctcctctattggccagaggtcagatccatcccaggccagtcttggtactcagtcccagcctcggctggctccggccttcatccgcccgccctgcgtgctccatgagcaggaggcagcaaggccccgctcctttcttcagctcctgtctatttctctctcccatagtgggcatttgagccagatgtgtttcagaaacaggccatcctgcacttggaacggcatgactctgtctttgtcgcagctcacacatctgcaggaaaaacagttgtggctgaatatgccattgccctggcccagaaacacatgacacggtatgagttcctttgccaacctcccccttcaccagccagccccattttctcctgcatcctttgaaaatctcatctcttcccccacctctctagctcatcctttaagtgagaggttcagggctaagactgagacaagagcccagagagaaatgaaaagacatggtggggagaaagtttagaagaatgacctgggttagtttaggaaggggttggggacagaatttttctggggttatatcatgcaggagaatgtaagggcagtttgggtgaagaagaggagcacctgagcttctggggcatgcttccacgagggctccatgtgggagaggaagtgcgggccatgagtctgcggagggactggctaacttcatgctctcttcccagcaccatctacacttcgcccatcaaggccctgagcaaccagaagttccgggacttccgaaacacattcggggatgtggggctgctcaccggggatgtacagctgcatccggaggcctcctgcctcatcatgaccacagagatccttcggtgagagatggacactcaatacaggggagttttggctgggaagatgtggccgttgtggagagtgtgctgtctgaggagggggtggagacgagccactggggagtcaatccttggcctcttctccccagctccatgctgtacagtggctcagatgttattcgggacctggagtgggtcatctttgatgaggttcactatatcaacgatgtcgaggtaagggccatgggct

SEQ ID NO: 14015 - DNA, 1157 bp, Homo sapiens
acttccgggctgccaggcagctgctgtggctccaggatgatggagacagagcgacttgtgctaccccctccagatcccctggacctaccccttcgggccgtggagctcggatgcacggggcactgggagctgctgaacttgcctggagctccagagagtagccttccccatggcctccctccttgtgccccagatctgcagcaagaagcagaacagttgtttctgtcatccccagcctggctgcctctgcatggtgtggagcactcagcccgaaaatggcagaggaagacggatccctggtctcttttggctgtcctgggagccccagtcccatccgacctacaggcccaaagacacccaaccacaggccagatactgggttacaaagaggtcttgctggagaacacaaatctctcggctacaacctccttgtctcttcgccggcctccagggccagcctcccagtccttatggggaaatccaactcagtatcccttctggccaggggggatggatgaacccaccataacagatctgaacacacgggaggaggctgaggaggagatagactttgagaaagatcttcttactattccacctggtttcaagaaaggcatggactttgcaccaaaaggaagcgtccacagctgtatccaccccagaggccccagagcctccatctcaggagcagtgggccatccctgtggacgccacctcccctgttggtgatttctatcgcctcattccccagccagccttccagtgggcatttgagccagatgtgtttcagaaacaggccatcctgcacttggaacggcatgactctgtctttgtcgcagctcacacatctgcaggaaaaacagttgtggctgaatatgccattgccctggcccagaaacacatgacacgcaccatctacacttcgcccatcaaggccctgagcaaccagaagttccgggacttccgaaacacattcggggatgtggggctgctcaccggggatgtacagctgcatccggaggcctcctgcctcatcatgaccacagagatccttcgctccatgctgtacagtggctcagatgttattcgggacctggagtgggtcatctttgatgaggttcactatatcaacgatgtcgaggtaagggccatgggct

SEQ ID NO: 14016 - DNA, 1617 bp, Homo sapiens
ctcccgcaaagacagcaaggtaaggagcctggggtaaccagtgtgtggagcaggaggttggccaaagacaggctgggaataggtaggcatccagaggccagtgtgttgagggtggggagtgtgacagattgggcctggagactcccctttcacagcttcccctgctcccacccaaggcccatgaacaggccctggctgaactgaccaagaggctgggagctttggaggagcctgacatgactggccaactggtcgacctgcctgaatattacagctggggggaggaactgacagagacccagcacatgatccaggtgagcaagtgtgagtgctgaggaggtgataggagaagggaagagaagatcgtgttactctaggtgctactaaacttagtccaagtgtctgtccctgtgatgcctcctcccatctgtcctttgctcttcagcgacgcatcatggagtctgtgaacgggctgaagtctctctcagcaggaagggtggtggttgtgaagaatcaggagcatcacaacgcattgggagtgatcctacaggtgagggtgatgggaatttggactccagagggtgggagggagcaagccctctctccattttccccacttggccagggcaggttgcgtcatcatagggccctcattttcccctcttgccctccttttcaccctctcccttcccatcaccacatcatgctcactccttcctcccaccaccccaagaagtctgctctgatcgcttgacttggttgcccctctctactggtgagctctgcatggttgcttcctgattcctgcccaagggtgggtatctggtctctgcctttgatgtctactcatcacacccccctctcctggcctctctgaccacccccaggtctcctcgaactccaccagcagagtattcacaaccctggtcttgtgtgataagcccttgtcccaggacccacaggacagggggccagccactgcagaggtgccctatccagatgacctcgtgggattcaagctgttcctgcctgaaggtgagagtgtggcagatgtctgttttctgccagcagtataagcaggatgcctgggtccatggcaatgtctgccctgctctccccttttcacagggccttgtgaccacaccgtggtcaagctccagccaggagatatggctgccatcaccaccaaggtgctccgggtgaatggggagaagatcttggaggacttcagcaagaggcagcagccaaaattcaagtcagagatgctagggaggcccttctcctccagaggggcacgtagaggcagggaggggcagtggtctgggagtttcctccagcctgagggagaccatgaagtggtggggttgtagtgagggggctcccccagcctaagggagactgtgaagtggaggttgtagtaagagggcttccacagcctgagggaggcttctgggggagagaagatcttaccccagatcttaagatctgctccctcttcaggaaggatcctccccttgcagccgtgaccactgctgtccaggaactgctgcgtctggctcaggcccacccagccggacctcccaccctcgaccctgtcaatgacctgcagctcaaaga

SEQ ID NO: 14017 - DNA, 691 bp, Homo sapiens
ctcccgcaaagacagcaaggcccatgaacaggccctggctgaactgaccaagaggctgggagctttggaggagcctgacatgactggccaactggtcgacctgcctgaatattacagctggggggaggaactgacagagacccagcacatgatccagcgacgcatcatggagtctgtgaacgggctgaagtctctctcagcaggaagggtggtggttgtgaagaatcaggagcatcacaacgcattgggagtgatcctacaggtctcctcgaactccaccagcagagtattcacaaccctggtcttgtgtgataagcccttgtcccaggacccacaggacagggggccagccactgcagaggtgccctatccagatgacctcgtgggattcaagctgttcctgcctgaagggccttgtgaccacaccgtggtcaagctccagccaggagatatggctgccatcaccaccaaggtgctccgggtgaatggggagaagatcttggaggacttcagcaagaggcagcagccaaaattcaagtcagagatgctagggaggcccttctcctccagaggggaaggatcctccccttgcagccgtgaccactgctgtccaggaactgctgcgtctggctcaggcccacccagccggacctcccaccctcgaccctgtcaatgacctgcagctcaaaga

SEQ ID NO: 14018 - DNA, 10611 bp, Homo sapiens
agcgactacttgccgcacttccgggctgccaggcagctgctgtggctccaggatgatggagacagagcgacttggtgagggggaggggagggaaatggaacggagtagccgatatggaatgaactttgacccctgacttttgacctttccccgtagtgctaccccctccagatcccctggacctaccccttcgggccgtggagctcggatgcacggggcactgggagctgctgaacttgcctggagctccagagagtagcgtgagtgacttttgaccctaacctttgacccgcattgagtccaaacctccttcaccctcctcacagtaggatctagcttaaccttgttcatctgtgcctgtactcctgtccatcccagcctgaaggggtgctggacagattacagcccagtgtacctgcagtacatgtgaggacagagcagaaagggctggggatatttttgctttgagagctgctctttcaaatgtggcatttctccgtggagctcccttctgtatccaagcaccagggcacttggtgactgagatgataggctttgagcctccaacctttcatccttaggtctgggacccctttttctaaaatcagtgagtctccaatttcagtgtgcttcatgattagccagggagctttttaaaaatgcacattcctaggtccagcctccatgtttctgaaatccaaaatctgccccaggtaattcagtagcaggtagtttttggccaagcctgattgtcctagtctgtttgacacatctgccatttctgatctgaacacaagtcccatcatctcttttgtctgcattttatcctctttccttacctaatgcctctcatcttgcccttgtttcagcttccccatggcctccctccttgtgccccagatctgcagcaagaagcagaacagttgtttctgtcatccccagcctggctgcctctgcatggtgtggagcactcagcccggtgaggagtctggaggggcttagactagggtgatgggttcctgaaggaagctgggacagaggaagaaagaagacccaaaagttactatttttctctccagaaaatggcagaggaagacggatccctggtctcttttggctgtcctgggagccccagtcccatccgacctacaggcccaaagacacccaaccacaggccagatactgggttacaaagaggtaggaggtcaggggtcatgagaaacagttggggagaaggggaggtggtcagagacaagctcagcctcattggggctctgatctcttgccttaggtcttgctggagaacacaaatctctcggctacaacctccttgtctcttcgccggcctccagggccagcctcccagtccttatggggaaatccaactcagtatcccttctggccaggtgactcttgtggagatgggatggtagaagagggtgtctttaatctccagggaagggttccccacctatctcgtattaccctcatcccatgaatccctgtctgtcctgtctcttcccaggggggatggatgaacccaccataacagatctgaacacacgggaggaggctgaggaggagatagactttgagaaaggtaaggtggggctctgagtctgagccttgaggaggaagagcccaggctatcactgggctactgctagccctcccatgtttttgagaaaattagaaaaagatattctgtccataacaacctttactgtcatctgctgggaaatttctacaacaacctttactgtcatctgttgggaaagtgtcatagcaaacatccctatctacagcatctgtcctgtaaatggtatcttttaggtttatataatgtacacaatttgttcaccagtgtgcagtgacctgatttcatgtccctatcctacagatcttcttactattccacctggtttcaagaaaggcatggactttgcaccaaaaggttagttttagtttttgagtggggtgtaggagaagtcatgtccttctcctaaggaacagagatggacatgacaaggttgaccttgttggcttgctcctcagattgtccaactccagctcctggactactaagccttagctgtatgttggagcctctggatttgggtgggggtgacgaggatgagaatgaggcagtgggacagccaggaggtcccagaggggacactgtttcagcctctccctgcagtgctcccctggcccgagcaagcagcttggaagacctagtgttgaaggttggtggttctgtgtagtggaggcaagaaagagccttgccaccaggatgtgggctggctaggatgggtctgaggggaagaaagggacatcttttgggaggagtgctaattgagagccctctggttgtatctttatcactgctacccctgactcttccaggaagcgtccacagctgtatccaccccagaggccccagagcctccatctcaggagcagtgggccatccctgtggacgccacctcccctgttggtgatttctatcgcctcattccccagccagccttccaggtactttggccccatcttcacacgctcctctacctctttctgggtcacactcccagccgaccccttgtctcctctattggccagaggtcagatccatcccaggccagtcttggtactcagtcccagcctcggctggctccggccttcatccgcccgccctgcgtgctccatgagcaggaggcagcaaggccccgctcctttcttcagctcctgtctatttctctctcccatagtgggcatttgagccagatgtgtttcagaaacaggccatcctgcacttggaacggcatgactctgtctttgtcgcagctcacacatctgcaggaaaaacagttgtggctgaatatgccattgccctggcccagaaacacatgacacggtatgagttcctttgccaacctcccccttcaccagccagccccattttctcctgcatcctttgaaaatctcatctcttcccccacctctctagctcatcctttaagtgagaggttcagggctaagactgagacaagagcccagagagaaatgaaaagacatggtggggagaaagtttagaagaatgacctgggttagtttaggaaggggttggggacagaatttttctggggttatatcatgcaggagaatgtaagggcagtttgggtgaagaagaggagcacctgagcttctggggcatgcttccacgagggctccatgtgggagaggaagtgcgggccatgagtctgcggagggactggctaacttcatgctctcttcccagcaccatctacacttcgcccatcaaggccctgagcaaccagaagttccgggacttccgaaacacattcggggatgtggggctgctcaccggggatgtacagctgcatccggaggcctcctgcctcatcatgaccacagagatccttcggtgagagatggacactcaatacaggggagttttggctgggaagatgtggccgttgtggagagtgtgctgtctgaggagggggtggagacgagccactggggagtcaatccttggcctcttctccccagctccatgctgtacagtggctcagatgttattcgggacctggagtgggtcatctttgatgaggttcactatatcaacgatgtcgaggtaagggccatgggctccccagaacccggcagtcctctcctttgggaccagttgagcgtctcccttattccacacactcagggccccttactgctttctttacccccatatggaatcctgtgcctctttatgggcagaagggcggcccctgccctcatgtgacctcccttccctctctgtgcccagcgtggggtcgtgtgggaggaggtgcttatcatgctacctgaccacgtttctatcatccttctgagtgccaccgtccccaacgcccttgagtttgctgactggattgggtgagacgtgtgtcccgggttgcctgggtgaagggggctacagtactccttgattcgggtgggggactaagtctaccacagcaaggagagcggtcaggccttaggggtgatgctggggaacatgtcccacctggtggctgtgggatcccctttgggtccagattactttgcatgttgaaatgggatgagatgttgggggatagccttccattctgggtctcagaaaagactgggtaaagttggaggggtagggaagggggtggggatgtgggttccttcccacgttcccacccctgacctgcttccctctcctttcttcaggcggctgaagcgtcgtcagatctatgtgattagcactgtaacccgccccgtgcccctggagcactatcttttcacagggaacagctccaagacccagggggagctctttttgttgctggactcccgaggagccttccatacaaaagggtaagcctcgagatgggggaaagagttagggctgggcccccagctggacattgtggctacccctccctgtgccccaggtactatgcagctgtggaggccaagaaggagagaatgagcaaacacgcccagacctttggggccaagcagcccacacatcaggggggccctgcacaggtgagaactgggagggttttgtacctgccagcacctgtttttcctcctatcttttttttccccttgtcccccaggggttttgacttgagctttgagcactgccccagttaacactagctcacctctcattggttcaggaactcaacctctgctccttccccttccccttccttctccaggaccgcggagtgtacctgtccctcctggcctccctccgcacacgtgcccagttgcccgtggtggtgttcaccttctcccggggccgctgtgatgagcaggcctcaggcctcacctcccttgacctcaccaccagttcggagaagagcgagatccacctcttcctgcagcgctgccttgctcgcctccgtggctctgaccgccagctgccccaggtgcgtctgtgtgcgtctgtgtgcgtgcatgcacacatttggcagactggtggggatagggtgttccgagactccatccctgaccatgggcctcctcccaccaaaggtcctgcacatgtcagagctcctgaatcgcggcctgggtgtgcaccatagcggcatcctgcccatcctcaaggagatcgtggagatgctcttcagccgtggcctggtcaaggtgcatgtggtggtggaaagggactcctcagggtgcttgttgcccacttaggggctgcccagagggcagaggggcagaggtttaggcaggccagtgctgtggttaagaatctgggctctggattcagactacctgggtttgaatcccaggtacaccatgtattcacagtatcatcctggaccaattatttaaccttcctgaactttaggtttcccatcttaaaatggggatgcataagatatgaatacgtaggtctcagaaaagaaacccaggaagctagcaagcattcgaaaagttattagtaatcagaaatatacaaattgaagtactcacaagatacgactttacagctattagactggtaaaatttaggaaactagttcatgccgagtgttgccagagatataggaggttgtagggttctgggaatcctttacgggatgcctagccagtttggaatgcacgctggcactatttagacaaaataactatattggccgggcatggtggctcacacctgtaatcccagcactttgggaggctgaggtgggtggatcacaaggtcaagagatcgagaccatcctggccaacatggtgaaaccctgtctctactaaaaatacaaaaattagctgggcatggtggcaggtgcctgtagtcccagctacttgggaggctgaggcaggagaattgcttgaacccaggaggcagagattgcagtgagccaagatagcaccgctgcactccagcctgggcaacagagggagactccatctcaaaacaaaaacaaacaaagaaacaaacaaaaactatatcatactctgagcttatatttcattcctgggtatatatcacaaagaaattctcaccctggtctgtgagagaacatgtacacccatcctttgtttgtggtggcatggtgttggtagtaccagggtgcccttcactgggagagagggaaggttagtgtgggggatgcacccatagagtgttctgcagcagttggaagcagtgggttagatgtggccacaggaacatggacagatgttgaaacactaggtggagaaaaagaagcaaaaaaaaatcagatatataaccactttttatatgaattataaactacaagctcacaaaagaagacatgttctataagatcatatttatataaaaagatatttgttggatacattggaatgattgcagtcagggatgggaatgggatatgaaggtaaaagttaagaaatagaaataagtagctacataagtaaaatgaggaaaacaataatacctgccctatagatttgcctggagagttcagtgagatcccataagtaacaactgggatggtgccttatgcctacaaagtaaggtgggcttggccagggctgggggtgtgtgtatgtagagcctttgctgatcctttctgttctcctctgtcccaggtcttgtttgccacagagacctttgccatgggagtaaacatgcctgctcgtacagtagtgtttgactccatgcgcaaacacgatggctccaccttccgggacctgctccctggggagtatgtgcagatggcaggccgggcagggcggaggggcctggaccccacaggcaccgttatcctgctctgcaagggccgagtgcccgagatggcagacctgcaccgcatgatgatggtgagcgggccagcatgctcggcagggccccagctccaggaccttgctggattctgtcttcgattctcctctcttctttttcttcttccttttttttttggagacagggtcttgctctgttacctaggctggagtgcagtggcacaatctcgggtcaccgcaacctctgccttccaggctcaagggatcctcccacctcagcctcccaagtaggtgggattccaggcacatgccacacaggcctggctaattttttttttttttttatgctttgtagagatgaggttttgctatgttgcacaggttggtcttgaacttctgggctcaagcagtctgtctgcctcagcttcccaaagtactgggattataggtgtgggccacagcgcccaacttcctccgacttttttgttttgcctgggagaagctgaggtaggagtgagtgaatccaaggatgagattggagcccatctcttccagttttctcccatgtgaatatggagctagatggggcctttgagtccatttatttcagtttgctcccttatgttacagaagaggtgagcaagtggtttgtccaaggccccatggttgcagagctaggaccggatctgacgggagtaggcccagtccagaagactggctggggttcagtaggtcccaccctgatctcagtgacttctgtgacctgactccaggggaagccgtcccagctgcagtcccagttccgcctcacgtacactatgatcctcaacttgctgcgagtggatgccctcagggtggaggacatgatgaagaggagcttctctgagtttccctcccgcaaagacagcaaggtaaggagcctggggtaaccagtgtgtggagcaggaggttggccaaagacaggctgggaataggtaggcatccagaggccagtgtgttgagggtggggagtgtgacagattgggcctggagactcccctttcacagcttcccctgctcccacccaaggcccatgaacaggccctggctgaactgaccaagaggctgggagctttggaggagcctgacatgactggccaactggtcgacctgcctgaatattacagctggggggaggaactgacagagacccagcacatgatccaggtgagcaagtgtgagtgctgaggaggtgataggagaagggaagagaagatcgtgttactctaggtgctactaaacttagtccaagtgtctgtccctgtgatgcctcctcccatctgtcctttgctcttcagcgacgcatcatggagtctgtgaacgggctgaagtctctctcagcaggaagggtggtggttgtgaagaatcaggagcatcacaacgcattgggagtgatcctacaggtgagggtgatgggaatttggactccagagggtgggagggagcaagccctctctccattttccccacttggccagggcaggttgcgtcatcatagggccctcattttcccctcttgccctccttttcaccctctcccttcccatcaccacatcatgctcactccttcctcccaccaccccaagaagtctgctctgatcgcttgacttggttgcccctctctactggtgagctctgcatggttgcttcctgattcctgcccaagggtgggtatctggtctctgcctttgatgtctactcatcacacccccctctcctggcctctctgaccacccccaggtctcctcgaactccaccagcagagtattcacaaccctggtcttgtgtgataagcccttgtcccaggacccacaggacagggggccagccactgcagaggtgccctatccagatgacctcgtgggattcaagctgttcctgcctgaaggtgagagtgtggcagatgtctgttttctgccagcagtataagcaggatgcctgggtccatggcaatgtctgccctgctctccccttttcacagggccttgtgaccacaccgtggtcaagctccagccaggagatatggctgccatcaccaccaaggtgctccgggtgaatggggagaagatcttggaggacttcagcaagaggcagcagccaaaattcaagtcagagatgctagggaggcccttctcctccagaggggcacgtagaggcagggaggggcagtggtctgggagtttcctccagcctgagggagaccatgaagtggtggggttgtagtgagggggctcccccagcctaagggagactgtgaagtggaggttgtagtaagagggcttccacagcctgagggaggcttctgggggagagaagatcttaccccagatcttaagatctgctccctcttcaggaaggatcctccccttgcagccgtgaccactgctgtccaggaactgctgcgtctggctcaggcccacccagccggacctcccaccctcgaccctgtcaatgacctgcagctcaaagatatgtcagttgtagagggtgggctccgggcccggaagctggaggagctgatccagggggctcagtgtgtacacagcccccgttttcctgcccaggtaggaccctgggtggtaactcccaagctgggagtaggggcttttcctctgtggtcccctgtagactgaccgcccccatctcagcccttgtcctcagtgcacccctgctaaggggcaaggagaaggctgacgggtggctctctgcagtacctgaagctgcgggagcgaatgcagatacagaaggagatggagcggctgcgcttcctactgtcggatcagtcattgctgctgcttcctgagtaccatcagcgagtagaggtgggtggggcagtggttggggcaggggggctaggggacagcagtgtgtccaatgcccaccctttttcttgcaggtgctccgaaccctgggttatgtggacgaggcgggcactgtgaagctggcagggcgggtggcttgtgccatgagcagccatgagttgctcctcactgagctcatgtttgacaatgcactgagcaccctgcggcctgaggagattgctgccttgctctctggcctggtctgccagagccctggggacgctggggatcagctcccaaacaccctcaagcaggtaggggacaccacccctttctccctgccagggctgtggcattcctgaccttcaccttcaggtagtcccccaggtgaccccctccagccctgtaagtgccccaaggatggaaaatggctgccttcttgatctggtccttccctgtcctggagcaggaaggcaggccttaacctctccttctttcctgcagggaatagaacgtgtccgggctgtggccaagcggattggtgaggtccaggtggcttgtggcctgaaccagacggtggaggaatttgtgggggagctgaattttgggctggttgaggttgtatatgagtgggcccggggcatggtgagtacctgaggtttgggattttgcagacggctggctggggagaacctgcccaggctgagtgcatccagtcctcaccctactttccccacagcccttctccgagttggcagggctctcagggacccctgagggcctggtggtccgctgcattcagcgcctggctgagatgtgtcgctcactgcggggggcagcccgcctggtaggagagcctgtgctgggtgccaagatggagacagcggctaccttgctacggcgggacatcgtatttgcggccagcctctacacccagtgaatgccccatgtaaaaacatgatgataaaacagcaaa

SEQ ID NO: 14019 - DNA, 4507 bp, Homo sapiens
agcgactacttgccgcacttccgggctgccaggcagctgctgtggctccaggatgatggagacagagcgacttgtgctaccccctccagatcccctggacctaccccttcgggccgtggagctcggatgcacggggcactgggagctgctgaacttgcctggagctccagagagtagccttccccatggcctccctccttgtgccccagatctgcagcaagaagcagaacagttgtttctgtcatccccagcctggctgcctctgcatggtgtggagcactcagcccgaaaatggcagaggaagacggatccctggtctcttttggctgtcctgggagccccagtcccatccgacctacaggcccaaagacacccaaccacaggccagatactgggttacaaagaggtcttgctggagaacacaaatctctcggctacaacctccttgtctcttcgccggcctccagggccagcctcccagtccttatggggaaatccaactcagtatcccttctggccaggggggatggatgaacccaccataacagatctgaacacacgggaggaggctgaggaggagatagactttgagaaagatcttcttactattccacctggtttcaagaaaggcatggactttgcaccaaaaggttagttttagtttttgagtggggtgtaggagaagtcatgtccttctcctaaggaacagagatggacatgacaaggttgaccttgttggcttgctcctcagattgtccaactccagctcctggactactaagccttagctgtatgttggagcctctggatttgggtgggggtgacgaggatgagaatgaggcagtgggacagccaggaggtcccagaggggacactgtttcagcctctccctgcagtgctcccctggcccgagcaagcagcttggaagacctagtgttgaaggttggtggttctgtgtagtggaggcaagaaagagccttgccaccaggatgtgggctggctaggatgggtctgaggggaagaaagggacatcttttgggaggagtgctaattgagagccctctggttgtatctttatcactgctacccctgactcttccaggaagcgtccacagctgtatccaccccagaggccccagagcctccatctcaggagcagtgggccatccctgtggacgccacctcccctgttggtgatttctatcgcctcattccccagccagccttccagtgggcatttgagccagatgtgtttcagaaacaggccatcctgcacttggaacggcatgactctgtctttgtcgcagctcacacatctgcaggaaaaacagttgtggctgaatatgccattgccctggcccagaaacacatgacacgcaccatctacacttcgcccatcaaggccctgagcaaccagaagttccgggacttccgaaacacattcggggatgtggggctgctcaccggggatgtacagctgcatccggaggcctcctgcctcatcatgaccacagagatccttcgctccatgctgtacagtggctcagatgttattcgggacctggagtgggtcatctttgatgaggttcactatatcaacgatgtcgaggtaagggccatgggctccccagaacccggcagtcctctcctttgggaccagttgagcgtctcccttattccacacactcagggccccttactgctttctttacccccatatggaatcctgtgcctctttatgggcagaagggcggcccctgccctcatgtgacctcccttccctctctgtgcccagcgtggggtcgtgtgggaggaggtgcttatcatgctacctgaccacgtttctatcatccttctgagtgccaccgtccccaacgcccttgagtttgctgactggattgggcggctgaagcgtcgtcagatctatgtgattagcactgtaacccgccccgtgcccctggagcactatcttttcacagggaacagctccaagacccagggggagctctttttgttgctggactcccgaggagccttccatacaaaagggtactatgcagctgtggaggccaagaaggagagaatgagcaaacacgcccagacctttggggccaagcagcccacacatcaggggggccctgcacaggaccgcggagtgtacctgtccctcctggcctccctccgcacacgtgcccagttgcccgtggtggtgttcaccttctcccggggccgctgtgatgagcaggcctcaggcctcacctcccttgacctcaccaccagttcggagaagagcgagatccacctcttcctgcagcgctgccttgctcgcctccgtggctctgaccgccagctgccccaggtcctgcacatgtcagagctcctgaatcgcggcctgggtgtgcaccatagcggcatcctgcccatcctcaaggagatcgtggagatgctcttcagccgtggcctggtcaaggtcttgtttgccacagagacctttgccatgggagtaaacatgcctgctcgtacagtagtgtttgactccatgcgcaaacacgatggctccaccttccgggacctgctccctggggagtatgtgcagatggcaggccgggcagggcggaggggcctggaccccacaggcaccgttatcctgctctgcaagggccgagtgcccgagatggcagacctgcaccgcatgatgatggggaagccgtcccagctgcagtcccagttccgcctcacgtacactatgatcctcaacttgctgcgagtggatgccctcagggtggaggacatgatgaagaggagcttctctgagtttccctcccgcaaagacagcaaggcccatgaacaggccctggctgaactgaccaagaggctgggagctttggaggagcctgacatgactggccaactggtcgacctgcctgaatattacagctggggggaggaactgacagagacccagcacatgatccagcgacgcatcatggagtctgtgaacgggctgaagtctctctcagcaggaagggtggtggttgtgaagaatcaggagcatcacaacgcattgggagtgatcctacaggtctcctcgaactccaccagcagagtattcacaaccctggtcttgtgtgataagcccttgtcccaggacccacaggacagggggccagccactgcagaggtgccctatccagatgacctcgtgggattcaagctgttcctgcctgaagggccttgtgaccacaccgtggtcaagctccagccaggagatatggctgccatcaccaccaaggtgctccgggtgaatggggagaagatcttggaggacttcagcaagaggcagcagccaaaattcaagaaggatcctccccttgcagccgtgaccactgctgtccaggaactgctgcgtctggctcaggcccacccagccggacctcccaccctcgaccctgtcaatgacctgcagctcaaagatatgtcagttgtagagggtgggctccgggcccggaagctggaggagctgatccagggggctcagtgtgtacacagcccccgttttcctgcccagcccttgtcctcagtgcacccctgctaaggggcaaggagaaggctgacgggtggctctctgcagtacctgaagctgcgggagcgaatgcagatacagaaggagatggagcggctgcgcttcctactgtcggatcagtcattgctgctgcttcctgagtaccatcagcgagtagaggtgggtggggcagtggttggggcaggggggctaggggacagcagtgtgtccaatgcccaccctttttcttgcaggtgctccgaaccctgggttatgtggacgaggcgggcactgtgaagctggcagggcgggtggcttgtgccatgagcagccatgagttgctcctcactgagctcatgtttgacaatgcactgagcaccctgcggcctgaggagattgctgccttgctctctggcctggtctgccagagccctggggacgctggggatcagctcccaaacaccctcaagcagggaatagaacgtgtccgggctgtggccaagcggattggtgaggtccaggtggcttgtggcctgaaccagacggtggaggaatttgtgggggagctgaattttgggctggttgaggttgtatatgagtgggcccggggcatggtgagtacctgaggtttgggattttgcagacggctggctggggagaacctgcccaggctgagtgcatccagtcctcaccctactttccccacagcccttctccgagttggcagggctctcagggacccctgagggcctggtggtccgctgcattcagcgcctggctgagatgtgtcgctcactgcggggggcagcccgcctggtaggagagcctgtgctgggtgccaagatggagacagcggctaccttgctacggcgggacatcgtatttgcggccagcctctacacccagtgaatgccccatgtaaaaacatgatgataaaacagcaaa

SEQ ID NO: 14020 - DNA, 1514 bp, Homo sapiens
tgagagccctctggttgtatctttatcactgctacccctgactcttccaggaagcgtccacagctgtatccaccccagaggccccagagcctccatctcaggagcagtgggccatccctgtggacgccacctcccctgttggtgatttctatcgcctcattccccagccagccttccaggtactttggccccatcttcacacgctcctctacctctttctgggtcacactcccagccgaccccttgtctcctctattggccagaggtcagatccatcccaggccagtcttggtactcagtcccagcctcggctggctccggccttcatccgcccgccctgcgtgctccatgagcaggaggcagcaaggccccgctcctttcttcagctcctgtctatttctctctcccatagtgggcatttgagccagatgtgtttcagaaacaggccatcctgcacttggaacggcatgactctgtctttgtcgcagctcacacatctgcaggaaaaacagttgtggctgaatatgccattgccctggcccagaaacacatgacacggtatgagttcctttgccaacctcccccttcaccagccagccccattttctcctgcatcctttgaaaatctcatctcttcccccacctctctagctcatcctttaagtgagaggttcagggctaagactgagacaagagcccagagagaaatgaaaagacatggtggggagaaagtttagaagaatgacctgggttagtttaggaaggggttggggacagaatttttctggggttatatcatgcaggagaatgtaagggcagtttgggtgaagaagaggagcacctgagcttctggggcatgcttccacgagggctccatgtgggagaggaagtgcgggccatgagtctgcggagggactggctaacttcatgctctcttcccagcaccatctacacttcgcccatcaaggccctgagcaaccagaagttccgggacttccgaaacacattcggggatgtggggctgctcaccggggatgtacagctgcatccggaggcctcctgcctcatcatgaccacagagatccttcggtgagagatggacactcaatacaggggagttttggctgggaagatgtggccgttgtggagagtgtgctgtctgaggagggggtggagacgagccactggggagtcaatccttggcctcttctccccagctccatgctgtacagtggctcagatgttattcgggacctggagtgggtcatctttgatgaggttcactatatcaacgatgtcgaggtaagggccatgggctccccagaacccggcagtcctctcctttgggaccagttgagcgtctcccttattccacacactcagggccccttactgctttctttacccccatatggaatcctgtgcctctttatgggcagaagggcggcccctgccctcatgtgacctcccttccctctctgtgcccagcgtggggtcgtgtgggaggaggtgct

SEQ ID NO: 14021 - DNA, 583 bp, Homo sapiens
tgagagccctctggttgtatctttatcactgctacccctgactcttccaggaagcgtccacagctgtatccaccccagaggccccagagcctccatctcaggagcagtgggccatccctgtggacgccacctcccctgttggtgatttctatcgcctcattccccagccagccttccagtgggcatttgagccagatgtgtttcagaaacaggccatcctgcacttggaacggcatgactctgtctttgtcgcagctcacacatctgcaggaaaaacagttgtggctgaatatgccattgccctggcccagaaacacatgacacgcaccatctacacttcgcccatcaaggccctgagcaaccagaagttccgggacttccgaaacacattcggggatgtggggctgctcaccggggatgtacagctgcatccggaggcctcctgcctcatcatgaccacagagatccttcgctccatgctgtacagtggctcagatgttattcgggacctggagtgggtcatctttgatgaggttcactatatcaacgatgtcgagcgtggggtcgtgtgggaggaggtgct

SEQ ID NO: 14022 - DNA, 1064 bp, Homo sapiens
cgttttcctgcccaggtaggaccctgggtggtaactcccaagctgggagtaggggcttttcctctgtggtcccctgtagactgaccgcccccatctcagcccttgtcctcagtgcacccctgctaaggggcaaggagaaggctgacgggtggctctctgcagtacctgaagctgcgggagcgaatgcagatacagaaggagatggagcggctgcgcttcctactgtcggatcagtcattgctgctgcttcctgagtaccatcagcgagtagaggtgggtggggcagtggttggggcaggggggctaggggacagcagtgtgtccaatgcccaccctttttcttgcaggtgctccgaaccctgggttatgtggacgaggcgggcactgtgaagctggcagggcgggtggcttgtgccatgagcagccatgagttgctcctcactgagctcatgtttgacaatgcactgagcaccctgcggcctgaggagattgctgccttgctctctggcctggtctgccagagccctggggacgctggggatcagctcccaaacaccctcaagcaggtaggggacaccacccctttctccctgccagggctgtggcattcctgaccttcaccttcaggtagtcccccaggtgaccccctccagccctgtaagtgccccaaggatggaaaatggctgccttcttgatctggtccttccctgtcctggagcaggaaggcaggccttaacctctccttctttcctgcagggaatagaacgtgtccgggctgtggccaagcggattggtgaggtccaggtggcttgtggcctgaaccagacggtggaggaatttgtgggggagctgaattttgggctggttgaggttgtatatgagtgggcccggggcatggtgagtacctgaggtttgggattttgcagacggctggctggggagaacctgcccaggctgagtgcatccagtcctcaccctactttccccacagcccttctccgagttggcagggctctcagggacccctgagggcctggtggtccgctgcattcagcgcctggctg

SEQ ID NO: 14023 - DNA, 455 bp, Homo sapiens
cgttttcctgcccagtacctgaagctgcgggagcgaatgcagatacagaaggagatggagcggctgcgcttcctactgtcggatcagtcattgctgctgcttcctgagtaccatcagcgagtagaggtgctccgaaccctgggttatgtggacgaggcgggcactgtgaagctggcagggcgggtggcttgtgccatgagcagccatgagttgctcctcactgagctcatgtttgacaatgcactgagcaccctgcggcctgaggagattgctgccttgctctctggcctggtctgccagagccctggggacgctggggatcagctcccaaacaccctcaagcagggaatagaacgtgtccgggctgtggccaagcggattgcccttctccgagttggcagggctctcagggacccctgagggcctggtggtccgctgcattcagcgcctggctg

SEQ ID NO: 14024 - DNA, 1429 bp, Homo sapiens
ttcaggaaggatcctccccttgcagccgtgaccactgctgtccaggaactgctgcgtctggctcaggcccacccagccggacctcccaccctcgaccctgtcaatgacctgcagctcaaagatatgtcagttgtagagggtgggctccgggcccggaagctggaggagctgatccagggggctcagtgtgtacacagcccccgttttcctgcccaggtaggaccctgggtggtaactcccaagctgggagtaggggcttttcctctgtggtcccctgtagactgaccgcccccatctcagcccttgtcctcagtgcacccctgctaaggggcaaggagaaggctgacgggtggctctctgcagtacctgaagctgcgggagcgaatgcagatacagaaggagatggagcggctgcgcttcctactgtcggatcagtcattgctgctgcttcctgagtaccatcagcgagtagaggtgggtggggcagtggttggggcaggggggctaggggacagcagtgtgtccaatgcccaccctttttcttgcaggtgctccgaaccctgggttatgtggacgaggcgggcactgtgaagctggcagggcgggtggcttgtgccatgagcagccatgagttgctcctcactgagctcatgtttgacaatgcactgagcaccctgcggcctgaggagattgctgccttgctctctggcctggtctgccagagccctggggacgctggggatcagctcccaaacaccctcaagcaggtaggggacaccacccctttctccctgccagggctgtggcattcctgaccttcaccttcaggtagtcccccaggtgaccccctccagccctgtaagtgccccaaggatggaaaatggctgccttcttgatctggtccttccctgtcctggagcaggaaggcaggccttaacctctccttctttcctgcagggaatagaacgtgtccgggctgtggccaagcggattggtgaggtccaggtggcttgtggcctgaaccagacggtggaggaatttgtgggggagctgaattttgggctggttgaggttgtatatgagtgggcccggggcatggtgagtacctgaggtttgggattttgcagacggctggctggggagaacctgcccaggctgagtgcatccagtcctcaccctactttccccacagcccttctccgagttggcagggctctcagggacccctgagggcctggtggtccgctgcattcagcgcctggctgagatgtgtcgctcactgcggggggcagcccgcctggtaggagagcctgtgctgggtgccaagatggagacagcggctaccttgctacggcgggacatcgtatttgcggccagcctctacacccagtgaatgccccatgtaaaaacatgatgataaaacagcaaa

SEQ ID NO: 14025 - DNA, 706 bp, Homo sapiens
ttcaggaaggatcctccccttgcagccgtgaccactgctgtccaggaactgctgcgtctggctcaggcccacccagccggacctcccaccctcgaccctgtcaatgacctgcagctcaaagatatgtcagttgtagagggcgggcactgtgaagctggcagggcgggtggcttgtgccatgagcagccatgagttgctcctcactgagctcatgtttgacaatgcactgagcaccctgcggcctgaggagattgctgccttgctctctggcctggtctgccagagccctggggacgctggggatcagctcccaaacaccctcaagcagggaatagaacgtgtccgggctgtggccaagcggattggtgaggtccaggtggcttgtggcctgaaccagacggtggaggaatttgtgggggagctgaattttgggctggttgaggttgtatatgagtgggcccggggcatgcccttctccgagttggcagggctctcagggacccctgagggcctggtggtccgctgcattcagcgcctggctgagatgtgtcgctcactgcggggggcagcccgcctggtaggagagcctgtgctgggtgccaagatggagacagcggctaccttgctacggcgggacatcgtatttgcggccagcctctacacccagtgaatgccccatgtaaaaacatgatgataaaacagcaaa

SEQ ID NO: 14026 - DNA, 10578 bp, Homo sapiens
aggcagctgctgtggctccaggatgatggagacagagcgacttggtgagggggaggggagggaaatggaacggagtagccgatatggaatgaactttgacccctgacttttgacctttccccgtagtgctaccccctccagatcccctggacctaccccttcgggccgtggagctcggatgcacggggcactgggagctgctgaacttgcctggagctccagagagtagcgtgagtgacttttgaccctaacctttgacccgcattgagtccaaacctccttcaccctcctcacagtaggatctagcttaaccttgttcatctgtgcctgtactcctgtccatcccagcctgaaggggtgctggacagattacagcccagtgtacctgcagtacatgtgaggacagagcagaaagggctggggatatttttgctttgagagctgctctttcaaatgtggcatttctccgtggagctcccttctgtatccaagcaccagggcacttggtgactgagatgataggctttgagcctccaacctttcatccttaggtctgggacccctttttctaaaatcagtgagtctccaatttcagtgtgcttcatgattagccagggagctttttaaaaatgcacattcctaggtccagcctccatgtttctgaaatccaaaatctgccccaggtaattcagtagcaggtagtttttggccaagcctgattgtcctagtctgtttgacacatctgccatttctgatctgaacacaagtcccatcatctcttttgtctgcattttatcctctttccttacctaatgcctctcatcttgcccttgtttcagcttccccatggcctccctccttgtgccccagatctgcagcaagaagcagaacagttgtttctgtcatccccagcctggctgcctctgcatggtgtggagcactcagcccggtgaggagtctggaggggcttagactagggtgatgggttcctgaaggaagctgggacagaggaagaaagaagacccaaaagttactatttttctctccagaaaatggcagaggaagacggatccctggtctcttttggctgtcctgggagccccagtcccatccgacctacaggcccaaagacacccaaccacaggccagatactgggttacaaagaggtaggaggtcaggggtcatgagaaacagttggggagaaggggaggtggtcagagacaagctcagcctcattggggctctgatctcttgccttaggtcttgctggagaacacaaatctctcggctacaacctccttgtctcttcgccggcctccagggccagcctcccagtccttatggggaaatccaactcagtatcccttctggccaggtgactcttgtggagatgggatggtagaagagggtgtctttaatctccagggaagggttccccacctatctcgtattaccctcatcccatgaatccctgtctgtcctgtctcttcccaggggggatggatgaacccaccataacagatctgaacacacgggaggaggctgaggaggagatagactttgagaaaggtaaggtggggctctgagtctgagccttgaggaggaagagcccaggctatcactgggctactgctagccctcccatgtttttgagaaaattagaaaaagatattctgtccataacaacctttactgtcatctgctgggaaatttctacaacaacctttactgtcatctgttgggaaagtgtcatagcaaacatccctatctacagcatctgtcctgtaaatggtatcttttaggtttatataatgtacacaatttgttcaccagtgtgcagtgacctgatttcatgtccctatcctacagatcttcttactattccacctggtttcaagaaaggcatggactttgcaccaaaaggttagttttagtttttgagtggggtgtaggagaagtcatgtccttctcctaaggaacagagatggacatgacaaggttgaccttgttggcttgctcctcagattgtccaactccagctcctggactactaagccttagctgtatgttggagcctctggatttgggtgggggtgacgaggatgagaatgaggcagtgggacagccaggaggtcccagaggggacactgtttcagcctctccctgcagtgctcccctggcccgagcaagcagcttggaagacctagtgttgaaggttggtggttctgtgtagtggaggcaagaaagagccttgccaccaggatgtgggctggctaggatgggtctgaggggaagaaagggacatcttttgggaggagtgctaattgagagccctctggttgtatctttatcactgctacccctgactcttccaggaagcgtccacagctgtatccaccccagaggccccagagcctccatctcaggagcagtgggccatccctgtggacgccacctcccctgttggtgatttctatcgcctcattccccagccagccttccaggtactttggccccatcttcacacgctcctctacctctttctgggtcacactcccagccgaccccttgtctcctctattggccagaggtcagatccatcccaggccagtcttggtactcagtcccagcctcggctggctccggccttcatccgcccgccctgcgtgctccatgagcaggaggcagcaaggccccgctcctttcttcagctcctgtctatttctctctcccatagtgggcatttgagccagatgtgtttcagaaacaggccatcctgcacttggaacggcatgactctgtctttgtcgcagctcacacatctgcaggaaaaacagttgtggctgaatatgccattgccctggcccagaaacacatgacacggtatgagttcctttgccaacctcccccttcaccagccagccccattttctcctgcatcctttgaaaatctcatctcttcccccacctctctagctcatcctttaagtgagaggttcagggctaagactgagacaagagcccagagagaaatgaaaagacatggtggggagaaagtttagaagaatgacctgggttagtttaggaaggggttggggacagaatttttctggggttatatcatgcaggagaatgtaagggcagtttgggtgaagaagaggagcacctgagcttctggggcatgcttccacgagggctccatgtgggagaggaagtgcgggccatgagtctgcggagggactggctaacttcatgctctcttcccagcaccatctacacttcgcccatcaaggccctgagcaaccagaagttccgggacttccgaaacacattcggggatgtggggctgctcaccggggatgtacagctgcatccggaggcctcctgcctcatcatgaccacagagatccttcggtgagagatggacactcaatacaggggagttttggctgggaagatgtggccgttgtggagagtgtgctgtctgaggagggggtggagacgagccactggggagtcaatccttggcctcttctccccagctccatgctgtacagtggctcagatgttattcgggacctggagtgggtcatctttgatgaggttcactatatcaacgatgtcgaggtaagggccatgggctccccagaacccggcagtcctctcctttgggaccagttgagcgtctcccttattccacacactcagggccccttactgctttctttacccccatatggaatcctgtgcctctttatgggcagaagggcggcccctgccctcatgtgacctcccttccctctctgtgcccagcgtggggtcgtgtgggaggaggtgcttatcatgctacctgaccacgtttctatcatccttctgagtgccaccgtccccaacgcccttgagtttgctgactggattgggtgagacgtgtgtcccgggttgcctgggtgaagggggctacagtactccttgattcgggtgggggactaagtctaccacagcaaggagagcggtcaggccttaggggtgatgctggggaacatgtcccacctggtggctgtgggatcccctttgggtccagattactttgcatgttgaaatgggatgagatgttgggggatagccttccattctgggtctcagaaaagactgggtaaagttggaggggtagggaagggggtggggatgtgggttccttcccacgttcccacccctgacctgcttccctctcctttcttcaggcggctgaagcgtcgtcagatctatgtgattagcactgtaacccgccccgtgcccctggagcactatcttttcacagggaacagctccaagacccagggggagctctttttgttgctggactcccgaggagccttccatacaaaagggtaagcctcgagatgggggaaagagttagggctgggcccccagctggacattgtggctacccctccctgtgccccaggtactatgcagctgtggaggccaagaaggagagaatgagcaaacacgcccagacctttggggccaagcagcccacacatcaggggggccctgcacaggtgagaactgggagggttttgtacctgccagcacctgtttttcctcctatcttttttttccccttgtcccccaggggttttgacttgagctttgagcactgccccagttaacactagctcacctctcattggttcaggaactcaacctctgctccttccccttccccttccttctccaggaccgcggagtgtacctgtccctcctggcctccctccgcacacgtgcccagttgcccgtggtggtgttcaccttctcccggggccgctgtgatgagcaggcctcaggcctcacctcccttgacctcaccaccagttcggagaagagcgagatccacctcttcctgcagcgctgccttgctcgcctccgtggctctgaccgccagctgccccaggtgcgtctgtgtgcgtctgtgtgcgtgcatgcacacatttggcagactggtggggatagggtgttccgagactccatccctgaccatgggcctcctcccaccaaaggtcctgcacatgtcagagctcctgaatcgcggcctgggtgtgcaccatagcggcatcctgcccatcctcaaggagatcgtggagatgctcttcagccgtggcctggtcaaggtgcatgtggtggtggaaagggactcctcagggtgcttgttgcccacttaggggctgcccagagggcagaggggcagaggtttaggcaggccagtgctgtggttaagaatctgggctctggattcagactacctgggtttgaatcccaggtacaccatgtattcacagtatcatcctggaccaattatttaaccttcctgaactttaggtttcccatcttaaaatggggatgcataagatatgaatacgtaggtctcagaaaagaaacccaggaagctagcaagcattcgaaaagttattagtaatcagaaatatacaaattgaagtactcacaagatacgactttacagctattagactggtaaaatttaggaaactagttcatgccgagtgttgccagagatataggaggttgtagggttctgggaatcctttacgggatgcctagccagtttggaatgcacgctggcactatttagacaaaataactatattggccgggcatggtggctcacacctgtaatcccagcactttgggaggctgaggtgggtggatcacaaggtcaagagatcgagaccatcctggccaacatggtgaaaccctgtctctactaaaaatacaaaaattagctgggcatggtggcaggtgcctgtagtcccagctacttgggaggctgaggcaggagaattgcttgaacccaggaggcagagattgcagtgagccaagatagcaccgctgcactccagcctgggcaacagagggagactccatctcaaaacaaaaacaaacaaagaaacaaacaaaaactatatcatactctgagcttatatttcattcctgggtatatatcacaaagaaattctcaccctggtctgtgagagaacatgtacacccatcctttgtttgtggtggcatggtgttggtagtaccagggtgcccttcactgggagagagggaaggttagtgtgggggatgcacccatagagtgttctgcagcagttggaagcagtgggttagatgtggccacaggaacatggacagatgttgaaacactaggtggagaaaaagaagcaaaaaaaaatcagatatataaccactttttatatgaattataaactacaagctcacaaaagaagacatgttctataagatcatatttatataaaaagatatttgttggatacattggaatgattgcagtcagggatgggaatgggatatgaaggtaaaagttaagaaatagaaataagtagctacataagtaaaatgaggaaaacaataatacctgccctatagatttgcctggagagttcagtgagatcccataagtaacaactgggatggtgccttatgcctacaaagtaaggtgggcttggccagggctgggggtgtgtgtatgtagagcctttgctgatcctttctgttctcctctgtcccaggtcttgtttgccacagagacctttgccatgggagtaaacatgcctgctcgtacagtagtgtttgactccatgcgcaaacacgatggctccaccttccgggacctgctccctggggagtatgtgcagatggcaggccgggcagggcggaggggcctggaccccacaggcaccgttatcctgctctgcaagggccgagtgcccgagatggcagacctgcaccgcatgatgatggtgagcgggccagcatgctcggcagggccccagctccaggaccttgctggattctgtcttcgattctcctctcttctttttcttcttccttttttttttggagacagggtcttgctctgttacctaggctggagtgcagtggcacaatctcgggtcaccgcaacctctgccttccaggctcaagggatcctcccacctcagcctcccaagtaggtgggattccaggcacatgccacacaggcctggctaattttttttttttttttatgctttgtagagatgaggttttgctatgttgcacaggttggtcttgaacttctgggctcaagcagtctgtctgcctcagcttcccaaagtactgggattataggtgtgggccacagcgcccaacttcctccgacttttttgttttgcctgggagaagctgaggtaggagtgagtgaatccaaggatgagattggagcccatctcttccagttttctcccatgtgaatatggagctagatggggcctttgagtccatttatttcagtttgctcccttatgttacagaagaggtgagcaagtggtttgtccaaggccccatggttgcagagctaggaccggatctgacgggagtaggcccagtccagaagactggctggggttcagtaggtcccaccctgatctcagtgacttctgtgacctgactccaggggaagccgtcccagctgcagtcccagttccgcctcacgtacactatgatcctcaacttgctgcgagtggatgccctcagggtggaggacatgatgaagaggagcttctctgagtttccctcccgcaaagacagcaaggtaaggagcctggggtaaccagtgtgtggagcaggaggttggccaaagacaggctgggaataggtaggcatccagaggccagtgtgttgagggtggggagtgtgacagattgggcctggagactcccctttcacagcttcccctgctcccacccaaggcccatgaacaggccctggctgaactgaccaagaggctgggagctttggaggagcctgacatgactggccaactggtcgacctgcctgaatattacagctggggggaggaactgacagagacccagcacatgatccaggtgagcaagtgtgagtgctgaggaggtgataggagaagggaagagaagatcgtgttactctaggtgctactaaacttagtccaagtgtctgtccctgtgatgcctcctcccatctgtcctttgctcttcagcgacgcatcatggagtctgtgaacgggctgaagtctctctcagcaggaagggtggtggttgtgaagaatcaggagcatcacaacgcattgggagtgatcctacaggtgagggtgatgggaatttggactccagagggtgggagggagcaagccctctctccattttccccacttggccagggcaggttgcgtcatcatagggccctcattttcccctcttgccctccttttcaccctctcccttcccatcaccacatcatgctcactccttcctcccaccaccccaagaagtctgctctgatcgcttgacttggttgcccctctctactggtgagctctgcatggttgcttcctgattcctgcccaagggtgggtatctggtctctgcctttgatgtctactcatcacacccccctctcctggcctctctgaccacccccaggtctcctcgaactccaccagcagagtattcacaaccctggtcttgtgtgataagcccttgtcccaggacccacaggacagggggccagccactgcagaggtgccctatccagatgacctcgtgggattcaagctgttcctgcctgaaggtgagagtgtggcagatgtctgttttctgccagcagtataagcaggatgcctgggtccatggcaatgtctgccctgctctccccttttcacagggccttgtgaccacaccgtggtcaagctccagccaggagatatggctgccatcaccaccaaggtgctccgggtgaatggggagaagatcttggaggacttcagcaagaggcagcagccaaaattcaagtcagagatgctagggaggcccttctcctccagaggggcacgtagaggcagggaggggcagtggtctgggagtttcctccagcctgagggagaccatgaagtggtggggttgtagtgagggggctcccccagcctaagggagactgtgaagtggaggttgtagtaagagggcttccacagcctgagggaggcttctgggggagagaagatcttaccccagatcttaagatctgctccctcttcaggaaggatcctccccttgcagccgtgaccactgctgtccaggaactgctgcgtctggctcaggcccacccagccggacctcccaccctcgaccctgtcaatgacctgcagctcaaagatatgtcagttgtagagggtgggctccgggcccggaagctggaggagctgatccagggggctcagtgtgtacacagcccccgttttcctgcccaggtaggaccctgggtggtaactcccaagctgggagtaggggcttttcctctgtggtcccctgtagactgaccgcccccatctcagcccttgtcctcagtgcacccctgctaaggggcaaggagaaggctgacgggtggctctctgcagtacctgaagctgcgggagcgaatgcagatacagaaggagatggagcggctgcgcttcctactgtcggatcagtcattgctgctgcttcctgagtaccatcagcgagtagaggtgggtggggcagtggttggggcaggggggctaggggacagcagtgtgtccaatgcccaccctttttcttgcaggtgctccgaaccctgggttatgtggacgaggcgggcactgtgaagctggcagggcgggtggcttgtgccatgagcagccatgagttgctcctcactgagctcatgtttgacaatgcactgagcaccctgcggcctgaggagattgctgccttgctctctggcctggtctgccagagccctggggacgctggggatcagctcccaaacaccctcaagcaggtaggggacaccacccctttctccctgccagggctgtggcattcctgaccttcaccttcaggtagtcccccaggtgaccccctccagccctgtaagtgccccaaggatggaaaatggctgccttcttgatctggtccttccctgtcctggagcaggaaggcaggccttaacctctccttctttcctgcagggaatagaacgtgtccgggctgtggccaagcggattggtgaggtccaggtggcttgtggcctgaaccagacggtggaggaatttgtgggggagctgaattttgggctggttgaggttgtatatgagtgggcccggggcatggtgagtacctgaggtttgggattttgcagacggctggctggggagaacctgcccaggctgagtgcatccagtcctcaccctactttccccacagcccttctccgagttggcagggctctcagggacccctgagggcctggtggtccgctgcattcagcgcctggctgagatgtgtcgctcactgcggggggcagcccgcctggtaggagagcctgtgctgggtgccaagatggagacagcggctaccttgctacggcgggacatcgtatttgcggccagcctctacacccagtgaatgccccatgtaaaaacatgatgataaaacagc

SEQ ID NO: 14027 - DNA, 3378 bp, Homo sapiens
aggcagctgctgtggctccaggatgatggagacagagcgacttgtgctaccccctccagatcccctggacctaccccttcgggccgtggagctcggatgcacggggcactgggagctgctgaacttgcctggagctccagagagtagcatcttcttactattccacctggtttcaagaaaggcatggactttgcaccaaaagattgtccaactccagctcctggactactaagccttagctgtatgttggagcctctggatttgggtgggggtgacgaggatgagaatgaggcagtgggacagccaggaggtcccagaggggacactgtttcagcctctccctgcagtgctcccctggcccgagcaagcagcttggaagacctagtgttgaaggaagcgtccacagctgtatccaccccagaggccccagagcctccatctcaggagcagtgggccatccctgtggacgccacctcccctgttggtgatttctatcgcctcattccccagccagccttccagtgggcatttgagccagatgtgtttcagaaacaggccatcctgcacttggaacggcatgactctgtctttgtcgcagctcacacatctgcaggaaaaacagttgtggctgaatatgccattgccctggcccagaaacacatgacacgcaccatctacacttcgcccatcaaggccctgagcaaccagaagttccgggacttccgaaacacattcggggatgtggggctgctcaccggggatgtacagctgcatccggaggcctcctgcctcatcatgaccacagagatccttcgctccatgctgtacagtggctcagatgttattcgggacctggagtgggtcatctttgatgaggttcactatatcaacgatgtcgagcgtggggtcgtgtgggaggaggtgcttatcatgctacctgaccacgtttctatcatccttctgagtgccaccgtccccaacgcccttgagtttgctgactggattgggcggctgaagcgtcgtcagatctatgtgattagcactgtaacccgccccgtgcccctggagcactatcttttcacagggaacagctccaagacccagggggagctctttttgttgctggactcccgaggagccttccatacaaaagggtactatgcagctgtggaggccaagaaggagagaatgagcaaacacgcccagacctttggggccaagcagcccacacatcaggggggccctgcacaggaccgcggagtgtacctgtccctcctggcctccctccgcacacgtgcccagttgcccgtggtggtgttcaccttctcccggggccgctgtgatgagcaggcctcaggcctcacctcccttgacctcaccaccagttcggagaagagcgagatccacctcttcctgcagcgctgccttgctcgcctccgtggctctgaccgccagctgccccaggtcctgcacatgtcagagctcctgaatcgcggcctgggtgtgcaccatagcggcatcctgcccatcctcaaggagatcgtggagatgctcttcagccgtggcctggtcaaggtcttgtttgccacagagacctttgccatgggagtaaacatgcctgctcgtacagtagtgtttgactccatgcgcaaacacgatggctccaccttccgggacctgctccctggggagtatgtgcagatggcaggccgggcagggcggaggggcctggaccccacaggcaccgttatcctgctctgcaagggccgagtgcccgagatggcagacctgcaccgcatgatgatggggaagccgtcccagctgcagtcccagttccgcctcacgtacactatgatcctcaacttgctgcgagtggatgccctcagggtggaggacatgatgaagaggagcttctctgagtttccctcccgcaaagacagcaaggcccatgaacaggccctggctgaactgaccaagaggctgggagctttggaggagcctgacatgactggccaactggtcgacctgcctgaatattacagctggggggaggaactgacagagacccagcacatgatccagcgacgcatcatggagtctgtgaacgggctgaagtctctctcagcaggaagggtggtggttgtgaagaatcaggagcatcacaacgcattgggagtgatcctacaggtctcctcgaactccaccagcagagtattcacaaccctggtcttgtgtgataagcccttgtcccaggacccacaggacagggggccagccactgcagaggtgccctatccagatgacctcgtgggattcaagctgttcctgcctgaagggccttgtgaccacaccgtggtcaagctccagccaggagatatggctgccatcaccaccaaggtgctccgggtgaatggggagaagatcttggaggacttcagcaagaggcagcagccaaaattcaagaaggatcctccccttgcagccgtgaccactgctgtccaggaactgctgcgtctggctcaggcccacccagccggacctcccaccctcgaccctgtcaatgacctgcagctcaaagatatgtcagttgtagagggtgggctccgggcccggaagctggaggagctgatccagggggctcagtgtgtacacagcccccgttttcctgcccagtacctgaagctgcgggagcgaatgcagatacagaaggagatggagcggctgcgcttcctactgtcggatcagtcattgctgctgcttcctgagtaccatcagcgagtagaggtgctccgaaccctgggttatgtggacgaggcgggcactgtgaagctggcagggcgggtggcttgtgccatgagcagccatgagttgctcctcactgagctcatgtttgacaatgcactgagcaccctgcggcctgaggagattgctgccttgctctctggcctggtctgccagagccctggggacgctggggatcagctcccaaacaccctcaagcagggaatagaacgtgtccgggctgtggccaagcggattggtgaggtccaggtggcttgtggcctgaaccagacggtggaggaatttgtgggggagctgaattttgggctggttgaggttgtatatgagtgggcccggggcatgcccttctccgagttggcagggctctcagggacccctgagggcctggtggtccgctgcattcagcgcctggctgagatgtgtcgctcactgcggggggcagcccgcctggtaggagagcctgtgctgggtgccaagatggagacagcggctaccttgctacggcgggacatcgtatttgcggccagcctctacacccagtgaatgccccatgtaaaaacatgatgataaaacagc

SEQ ID NO: 14028 - DNA, 1993 bp, Homo sapiens
gtgtgataagcccttgtcccaggacccacaggacagggggccagccactgcagaggtgccctatccagatgacctcgtgggattcaagctgttcctgcctgaaggtgagagtgtggcagatgtctgttttctgccagcagtataagcaggatgcctgggtccatggcaatgtctgccctgctctccccttttcacagggccttgtgaccacaccgtggtcaagctccagccaggagatatggctgccatcaccaccaaggtgctccgggtgaatggggagaagatcttggaggacttcagcaagaggcagcagccaaaattcaagtcagagatgctagggaggcccttctcctccagaggggcacgtagaggcagggaggggcagtggtctgggagtttcctccagcctgagggagaccatgaagtggtggggttgtagtgagggggctcccccagcctaagggagactgtgaagtggaggttgtagtaagagggcttccacagcctgagggaggcttctgggggagagaagatcttaccccagatcttaagatctgctccctcttcaggaaggatcctccccttgcagccgtgaccactgctgtccaggaactgctgcgtctggctcaggcccacccagccggacctcccaccctcgaccctgtcaatgacctgcagctcaaagatatgtcagttgtagagggtgggctccgggcccggaagctggaggagctgatccagggggctcagtgtgtacacagcccccgttttcctgcccaggtaggaccctgggtggtaactcccaagctgggagtaggggcttttcctctgtggtcccctgtagactgaccgcccccatctcagcccttgtcctcagtgcacccctgctaaggggcaaggagaaggctgacgggtggctctctgcagtacctgaagctgcgggagcgaatgcagatacagaaggagatggagcggctgcgcttcctactgtcggatcagtcattgctgctgcttcctgagtaccatcagcgagtagaggtgggtggggcagtggttggggcaggggggctaggggacagcagtgtgtccaatgcccaccctttttcttgcaggtgctccgaaccctgggttatgtggacgaggcgggcactgtgaagctggcagggcgggtggcttgtgccatgagcagccatgagttgctcctcactgagctcatgtttgacaatgcactgagcaccctgcggcctgaggagattgctgccttgctctctggcctggtctgccagagccctggggacgctggggatcagctcccaaacaccctcaagcaggtaggggacaccacccctttctccctgccagggctgtggcattcctgaccttcaccttcaggtagtcccccaggtgaccccctccagccctgtaagtgccccaaggatggaaaatggctgccttcttgatctggtccttccctgtcctggagcaggaaggcaggccttaacctctccttctttcctgcagggaatagaacgtgtccgggctgtggccaagcggattggtgaggtccaggtggcttgtggcctgaaccagacggtggaggaatttgtgggggagctgaattttgggctggttgaggttgtatatgagtgggcccggggcatggtgagtacctgaggtttgggattttgcagacggctggctggggagaacctgcccaggctgagtgcatccagtcctcaccctactttccccacagcccttctccgagttggcagggctctcagggacccctgagggcctggtggtccgctgcattcagcgcctggctgagatgtgtcgctcactgcggggggcagcccgcctggtaggagagcctgtgctgggtgccaagatggagacagcggctaccttgctacggcgggacatcgtatttgcggccagcctctacacccagtgaatgccccatgtaaaaacatgatgataaaacagcaaa

SEQ ID NO: 14029 - DNA, 1307 bp, Homo sapiens
gtgtgataagcccttgtcccaggacccacaggacagggggccagccactgcagaggtgccctatccagatgacctcgtgggattcaagctgttcctgcctgaagggccttgtgaccacaccgtggtcaagctccagccaggagatatggctgccatcaccaccaaggtgctccgggtgaatggggagaagatcttggaggacttcagcaagaggcagcagccaaaattcaagaaggatcctccccttgcagccgtgaccactgctgtccaggaactgctgcgtctggctcaggcccacccagccggacctcccaccctcgaccctgtcaatgacctgcagctcaaagatatgtcagttgtagagggtgggctccgggcccggaagctggaggagctgatccagggggctcagtgtgtacacagcccccgttttcctgcccagcccttgtcctcagtgcacccctgctaaggggcaaggagaaggctgacgggtggctctctgcagtacctgaagctgcgggagcgaatgcagatacagaaggagatggagcggctgcgcttcctactgtcggatcagtcattgctgctgcttcctgagtaccatcagcgagtagaggtgctccgaaccctgggttatgtggacgaggcgggcactgtgaagctggcagggcgggtggcttgtgccatgagcagccatgagttgctcctcactgagctcatgtttgacaatgcactgagcaccctgcggcctgaggagattgctgccttgctctctggcctggtctgccagagccctggggacgctggggatcagctcccaaacaccctcaagcagggaatagaacgtgtccgggctgtggccaagcggattggtgaggtccaggtggcttgtggcctgaaccagacggtggaggaatttgtgggggagctgaattttgggctggttgaggttgtatatgagtgggcccggggcatggtgagtacctgaggtttgggattttgcagacggctggctggggagaacctgcccaggctgagtgcatccagtcctcaccctactttccccacagcccttctccgagttggcagggctctcagggacccctgagggcctggtggtccgctgcattcagcgcctggctgagatgtgtcgctcactgcggggggcagcccgcctggtaggagagcctgtgctgggtgccaagatggagacagcggctaccttgctacggcgggacatcgtatttgcggccagcctctacacccagtgaatgccccatgtaaaaacatgatgataaaacagcaaa

SEQ ID NO: 14030 - DNA, 1884 bp, Homo sapiens
tggggggaggaactgacagagacccagcacatgatccaggtgagcaagtgtgagtgctgaggaggtgataggagaagggaagagaagatcgtgttactctaggtgctactaaacttagtccaagtgtctgtccctgtgatgcctcctcccatctgtcctttgctcttcagcgacgcatcatggagtctgtgaacgggctgaagtctctctcagcaggaagggtggtggttgtgaagaatcaggagcatcacaacgcattgggagtgatcctacaggtgagggtgatgggaatttggactccagagggtgggagggagcaagccctctctccattttccccacttggccagggcaggttgcgtcatcatagggccctcattttcccctcttgccctccttttcaccctctcccttcccatcaccacatcatgctcactccttcctcccaccaccccaagaagtctgctctgatcgcttgacttggttgcccctctctactggtgagctctgcatggttgcttcctgattcctgcccaagggtgggtatctggtctctgcctttgatgtctactcatcacacccccctctcctggcctctctgaccacccccaggtctcctcgaactccaccagcagagtattcacaaccctggtcttgtgtgataagcccttgtcccaggacccacaggacagggggccagccactgcagaggtgccctatccagatgacctcgtgggattcaagctgttcctgcctgaaggtgagagtgtggcagatgtctgttttctgccagcagtataagcaggatgcctgggtccatggcaatgtctgccctgctctccccttttcacagggccttgtgaccacaccgtggtcaagctccagccaggagatatggctgccatcaccaccaaggtgctccgggtgaatggggagaagatcttggaggacttcagcaagaggcagcagccaaaattcaagtcagagatgctagggaggcccttctcctccagaggggcacgtagaggcagggaggggcagtggtctgggagtttcctccagcctgagggagaccatgaagtggtggggttgtagtgagggggctcccccagcctaagggagactgtgaagtggaggttgtagtaagagggcttccacagcctgagggaggcttctgggggagagaagatcttaccccagatcttaagatctgctccctcttcaggaaggatcctccccttgcagccgtgaccactgctgtccaggaactgctgcgtctggctcaggcccacccagccggacctcccaccctcgaccctgtcaatgacctgcagctcaaagatatgtcagttgtagagggtgggctccgggcccggaagctggaggagctgatccagggggctcagtgtgtacacagcccccgttttcctgcccaggtaggaccctgggtggtaactcccaagctgggagtaggggcttttcctctgtggtcccctgtagactgaccgcccccatctcagcccttgtcctcagtgcacccctgctaaggggcaaggagaaggctgacgggtggctctctgcagtacctgaagctgcgggagcgaatgcagatacagaaggagatggagcggctgcgcttcctactgtcggatcagtcattgctgctgcttcctgagtaccatcagcgagtagaggtgggtggggcagtggttggggcaggggggctaggggacagcagtgtgtccaatgcccaccctttttcttgcaggtgctccgaaccctgggttatgtggacgaggcgggcactgtgaagctggcagggcgggtggcttgtgccatgagcagccatgagttgctcctcactgagctcatgtttgacaatgc

SEQ ID NO: 14031 - DNA, 931 bp, Homo sapiens
tggggggaggaactgacagagacccagcacatgatccagcgacgcatcatggagtctgtgaacgggctgaagtctctctcagcaggaagggtggtggttgtgaagaatcaggagcatcacaacgcattgggagtgatcctacaggtctcctcgaactccaccagcagagtattcacaaccctggtcttgtgtgataagcccttgtcccaggacccacaggacagggggccagccactgcagaggtgccctatccagatgacctcgtgggattcaagctgttcctgcctgaagggccttgtgaccacaccgtggtcaagctccagccaggagatatggctgccatcaccaccaaggtgctccgggtgaatggggagaagatcttggaggacttcagcaagaggcagcagccaaaattcaagaaggatcctccccttgcagccgtgaccactgctgtccaggaactgctgcgtctggctcaggcccacccagccggacctcccaccctcgaccctgtcaatgacctgcagctcaaagatatgtcagttgtagagggtgggctccgggcccggaagctggaggagctgatccagggggctcagtgtgtacacagcccccgttttcctgcccagtacctgaagctgcgggagcgaatgcagatacagaaggagatggagcggctgcgcttcctactgtcggatcagtcattgctgctgcttcctgagtaccatcagcgagtagaggtgggtggggcagtggttggggcaggggggctaggggacagcagtgtgtccaatgcccaccctttttcttgcaggtgctccgaaccctgggttatgtggacgaggcgggcactgtgaagctggcagggcgggtggcttgtgccatgagcagccatgagttgctcctcactgagctcatgtttgacaatgc

SEQ ID NO: 14032 - DNA, 955 bp, Homo sapiens
tgtagagggtgggctccgggcccggaagctggaggagctgatccagggggctcagtgtgtacacagcccccgttttcctgcccaggtaggaccctgggtggtaactcccaagctgggagtaggggcttttcctctgtggtcccctgtagactgaccgcccccatctcagcccttgtcctcagtgcacccctgctaaggggcaaggagaaggctgacgggtggctctctgcagtacctgaagctgcgggagcgaatgcagatacagaaggagatggagcggctgcgcttcctactgtcggatcagtcattgctgctgcttcctgagtaccatcagcgagtagaggtgggtggggcagtggttggggcaggggggctaggggacagcagtgtgtccaatgcccaccctttttcttgcaggtgctccgaaccctgggttatgtggacgaggcgggcactgtgaagctggcagggcgggtggcttgtgccatgagcagccatgagttgctcctcactgagctcatgtttgacaatgcactgagcaccctgcggcctgaggagattgctgccttgctctctggcctggtctgccagagccctggggacgctggggatcagctcccaaacaccctcaagcaggtaggggacaccacccctttctccctgccagggctgtggcattcctgaccttcaccttcaggtagtcccccaggtgaccccctccagccctgtaagtgccccaaggatggaaaatggctgccttcttgatctggtccttccctgtcctggagcaggaaggcaggccttaacctctccttctttcctgcagggaatagaacgtgtccgggctgtggccaagcggattggtgaggtccaggtggcttgtggcctgaaccagacggtggaggaatttgtgggggagctgaattttgggctggttgaggttgtatatgagtgg

SEQ ID NO: 14033 - DNA, 734 bp, Homo sapiens
tgtagagggtgggctccgggcccggaagctggaggagctgatccagggggctcagtgtgtacacagcccccgttttcctgcccagtacctgaagctgcgggagcgaatgcagatacagaaggagatggagcggctgcgcttcctactgtcggatcagtcattgctgctgcttcctgagtaccatcagcgagtagaggtgctccgaaccctgggttatgtggacgaggcgggcactgtgaagctggcagggcgggtggcttgtgccatgagcagccatgagttgctcctcactgagctcatgtttgacaatgcactgagcaccctgcggcctgaggagattgctgccttgctctctggcctggtctgccagagccctggggacgctggggatcagctcccaaacaccctcaagcaggtaggggacaccacccctttctccctgccagggctgtggcattcctgaccttcaccttcaggtagtcccccaggtgaccccctccagccctgtaagtgccccaaggatggaaaatggctgccttcttgatctggtccttccctgtcctggagcaggaaggcaggccttaacctctccttctttcctgcagggaatagaacgtgtccgggctgtggccaagcggattggtgaggtccaggtggcttgtggcctgaaccagacggtggaggaatttgtgggggagctgaattttgggctggttgaggttgtatatgagtgg

SEQ ID NO: 14034 - DNA, 2270 bp, Homo sapiens
gttccggggcggggcttacttcgcagcgactacttgccgcacttccgggctgccaggcagctgctgtggctccaggatgatggagacagagcgacttggtgagggggaggggagggaaatggaacggagtagccgatatggaatgaactttgacccctgacttttgacctttccccgtagtgctaccccctccagatcccctggacctaccccttcgggccgtggagctcggatgcacggggcactgggagctgctgaacttgcctggagctccagagagtagcgtgagtgacttttgaccctaacctttgacccgcattgagtccaaacctccttcaccctcctcacagtaggatctagcttaaccttgttcatctgtgcctgtactcctgtccatcccagcctgaaggggtgctggacagattacagcccagtgtacctgcagtacatgtgaggacagagcagaaagggctggggatatttttgctttgagagctgctctttcaaatgtggcatttctccgtggagctcccttctgtatccaagcaccagggcacttggtgactgagatgataggctttgagcctccaacctttcatccttaggtctgggacccctttttctaaaatcagtgagtctccaatttcagtgtgcttcatgattagccagggagctttttaaaaatgcacattcctaggtccagcctccatgtttctgaaatccaaaatctgccccaggtaattcagtagcaggtagtttttggccaagcctgattgtcctagtctgtttgacacatctgccatttctgatctgaacacaagtcccatcatctcttttgtctgcattttatcctctttccttacctaatgcctctcatcttgcccttgtttcagcttccccatggcctccctccttgtgccccagatctgcagcaagaagcagaacagttgtttctgtcatccccagcctggctgcctctgcatggtgtggagcactcagcccggtgaggagtctggaggggcttagactagggtgatgggttcctgaaggaagctgggacagaggaagaaagaagacccaaaagttactatttttctctccagaaaatggcagaggaagacggatccctggtctcttttggctgtcctgggagccccagtcccatccgacctacaggcccaaagacacccaaccacaggccagatactgggttacaaagaggtaggaggtcaggggtcatgagaaacagttggggagaaggggaggtggtcagagacaagctcagcctcattggggctctgatctcttgccttaggtcttgctggagaacacaaatctctcggctacaacctccttgtctcttcgccggcctccagggccagcctcccagtccttatggggaaatccaactcagtatcccttctggccaggtgactcttgtggagatgggatggtagaagagggtgtctttaatctccagggaagggttccccacctatctcgtattaccctcatcccatgaatccctgtctgtcctgtctcttcccaggggggatggatgaacccaccataacagatctgaacacacgggaggaggctgaggaggagatagactttgagaaaggtaaggtggggctctgagtctgagccttgaggaggaagagcccaggctatcactgggctactgctagccctcccatgtttttgagaaaattagaaaaagatattctgtccataacaacctttactgtcatctgctgggaaatttctacaacaacctttactgtcatctgttgggaaagtgtcatagcaaacatccctatctacagcatctgtcctgtaaatggtatcttttaggtttatataatgtacacaatttgttcaccagtgtgcagtgacctgatttcatgtccctatcctacagatcttcttactattccacctggtttcaagaaaggcatggactttgcaccaaaaggttagttttagtttttgagtggggtgtaggagaagtcatgtccttctcctaaggaacagagatggacatgacaaggttgaccttgttggcttgctcctcagattgtccaactccagctcctggactactaagccttagctgtatgttggagcctctggatttgggtgggggtgacgaggatgagaatgaggcagtgggacagccaggaggtcccagaggggacactgtttcagcctctccctgcagtgctcccctggcccgagcaagcagcttggaagacctagtgttgaag

SEQ ID NO: 14035 - DNA, 720 bp, Homo sapiens
gttccggggcggggcttacttcgcagcgactacttgccgcacttccgggctgccaggcagctgctgtggctccaggatgatggagacagagcgacttgtgctaccccctccagatcccctggacctaccccttcgggccgtggagctcggatgcacggggcactgggagctgctgaacttgcctggagctccagagagtagccttccccatggcctccctccttgtgccccagatctgcagcaagaagcagaacagttgtttctgtcatccccagcctggctgcctctgcatggtgtggagcactcagcccgaaaatggcagaggaagacggatccctggtctcttttggctgtcctgggagccccagtcccatccgacctacaggcccaaagacacccaaccacaggccagatactgggttacaaagaggtcttgctggagaacacaaatctctcggctacaacctccttgtctcttcgccggcctccagggccagcctcccagtccttatggggaaatccaactcagtatcccttctggccaggggggatggatgaacccaccataacagatctgaacacacgggaggaggctgaggaggagatagactttgagaaagatcttcttactattccacctggtttcaagaaaggcatggactttgcaccaaaagtgctcccctggcccgagcaagcagcttggaagacctagtgttgaag

SEQ ID NO: 14036 - DNA, 1277 bp, Homo sapiens
ccggaagctggaggagctgatccagggggctcagtgtgtacacagcccccgttttcctgcccaggtaggaccctgggtggtaactcccaagctgggagtaggggcttttcctctgtggtcccctgtagactgaccgcccccatctcagcccttgtcctcagtgcacccctgctaaggggcaaggagaaggctgacgggtggctctctgcagtacctgaagctgcgggagcgaatgcagatacagaaggagatggagcggctgcgcttcctactgtcggatcagtcattgctgctgcttcctgagtaccatcagcgagtagaggtgggtggggcagtggttggggcaggggggctaggggacagcagtgtgtccaatgcccaccctttttcttgcaggtgctccgaaccctgggttatgtggacgaggcgggcactgtgaagctggcagggcgggtggcttgtgccatgagcagccatgagttgctcctcactgagctcatgtttgacaatgcactgagcaccctgcggcctgaggagattgctgccttgctctctggcctggtctgccagagccctggggacgctggggatcagctcccaaacaccctcaagcaggtaggggacaccacccctttctccctgccagggctgtggcattcctgaccttcaccttcaggtagtcccccaggtgaccccctccagccctgtaagtgccccaaggatggaaaatggctgccttcttgatctggtccttccctgtcctggagcaggaaggcaggccttaacctctccttctttcctgcagggaatagaacgtgtccgggctgtggccaagcggattggtgaggtccaggtggcttgtggcctgaaccagacggtggaggaatttgtgggggagctgaattttgggctggttgaggttgtatatgagtgggcccggggcatggtgagtacctgaggtttgggattttgcagacggctggctggggagaacctgcccaggctgagtgcatccagtcctcaccctactttccccacagcccttctccgagttggcagggctctcagggacccctgagggcctggtggtccgctgcattcagcgcctggctgagatgtgtcgctcactgcggggggcagcccgcctggtaggagagcctgtgctgggtgccaagatggagacagcggctaccttgctacggcgggacatcgtatttgcggccagcctctacacccagtgaatgccccatgtaaaaacatgatgataaaacagcaaa

SEQ ID NO: 14037 - DNA, 866 bp, Homo sapiens
ccggaagctggaggagctgatccagggggctcagtgtgtacacagcccccgttttcctgcccagtacctgaagctgcgggagcgaatgcagatacagaaggagatggagcggctgcgcttcctactgtcggatcagtcattgctgctgcttcctgagtaccatcagcgagtagaggtgctccgaaccctgggttatgtggacgaggcgggcactgtgaagctggcagggcgggtggcttgtgccatgagcagccatgagttgctcctcactgagctcatgtttgacaatgcactgagcaccctgcggcctgaggagattgctgccttgctctctggcctggtctgccagagccctggggacgctggggatcagctcccaaacaccctcaagcagggaatagaacgtgtccgggctgtggccaagcggattggtgaggtccaggtggcttgtggcctgaaccagacggtggaggaatttgtgggggagctgaattttgggctggttgaggttgtatatgagtgggcccggggcatggtgagtacctgaggtttgggattttgcagacggctggctggggagaacctgcccaggctgagtgcatccagtcctcaccctactttccccacagcccttctccgagttggcagggctctcagggacccctgagggcctggtggtccgctgcattcagcgcctggctgagatgtgtcgctcactgcggggggcagcccgcctggtaggagagcctgtgctgggtgccaagatggagacagcggctaccttgctacggcgggacatcgtatttgcggccagcctctacacccagtgaatgccccatgtaaaaacatgatgataaaacagcaaa

SEQ ID NO: 14038 - DNA, 768 bp, Homo sapiens
ggatgatggagacagagcgacttggtgagggggaggggagggaaatggaacggagtagccgatatggaatgaactttgacccctgacttttgacctttccccgtagtgctaccccctccagatcccctggacctaccccttcgggccgtggagctcggatgcacggggcactgggagctgctgaacttgcctggagctccagagagtagcgtgagtgacttttgaccctaacctttgacccgcattgagtccaaacctccttcaccctcctcacagtaggatctagcttaaccttgttcatctgtgcctgtactcctgtccatcccagcctgaaggggtgctggacagattacagcccagtgtacctgcagtacatgtgaggacagagcagaaagggctggggatatttttgctttgagagctgctctttcaaatgtggcatttctccgtggagctcccttctgtatccaagcaccagggcacttggtgactgagatgataggctttgagcctccaacctttcatccttaggtctgggacccctttttctaaaatcagtgagtctccaatttcagtgtgcttcatgattagccagggagctttttaaaaatgcacattcctaggtccagcctccatgtttctgaaatccaaaatctgccccaggtaattcagtagcaggtagtttttggccaagcctgattgtcctagtctgtttgacacatctgccatttctgatctgaacacaagtcccatcatctcttttgtctg

SEQ ID NO: 14039 - DNA, 686 bp, Homo sapiens
ggatgatggagacagagcgacttgtgctaccccctccagatcccctggacctaccccttcgggccgtggagctcggatgcacggggcactgggagctgctgaacttgcctggagctccagagagtagcgtgagtgacttttgaccctaacctttgacccgcattgagtccaaacctccttcaccctcctcacagtaggatctagcttaaccttgttcatctgtgcctgtactcctgtccatcccagcctgaaggggtgctggacagattacagcccagtgtacctgcagtacatgtgaggacagagcagaaagggctggggatatttttgctttgagagctgctctttcaaatgtggcatttctccgtggagctcccttctgtatccaagcaccagggcacttggtgactgagatgataggctttgagcctccaacctttcatccttaggtctgggacccctttttctaaaatcagtgagtctccaatttcagtgtgcttcatgattagccagggagctttttaaaaatgcacattcctaggtccagcctccatgtttctgaaatccaaaatctgccccaggtaattcagtagcaggtagtttttggccaagcctgattgtcctagtctgtttgacacatctgccatttctgatctgaacacaagtcccatcatctcttttgtctg

SEQ ID NO: 14040 - DNA, 1428 bp, Homo sapiens
ggctgaactgaccaagaggctgggagctttggaggagcctgacatgactggccaactggtcgacctgcctgaatattacagctggggggaggaactgacagagacccagcacatgatccaggtgagcaagtgtgagtgctgaggaggtgataggagaagggaagagaagatcgtgttactctaggtgctactaaacttagtccaagtgtctgtccctgtgatgcctcctcccatctgtcctttgctcttcagcgacgcatcatggagtctgtgaacgggctgaagtctctctcagcaggaagggtggtggttgtgaagaatcaggagcatcacaacgcattgggagtgatcctacaggtgagggtgatgggaatttggactccagagggtgggagggagcaagccctctctccattttccccacttggccagggcaggttgcgtcatcatagggccctcattttcccctcttgccctccttttcaccctctcccttcccatcaccacatcatgctcactccttcctcccaccaccccaagaagtctgctctgatcgcttgacttggttgcccctctctactggtgagctctgcatggttgcttcctgattcctgcccaagggtgggtatctggtctctgcctttgatgtctactcatcacacccccctctcctggcctctctgaccacccccaggtctcctcgaactccaccagcagagtattcacaaccctggtcttgtgtgataagcccttgtcccaggacccacaggacagggggccagccactgcagaggtgccctatccagatgacctcgtgggattcaagctgttcctgcctgaaggtgagagtgtggcagatgtctgttttctgccagcagtataagcaggatgcctgggtccatggcaatgtctgccctgctctccccttttcacagggccttgtgaccacaccgtggtcaagctccagccaggagatatggctgccatcaccaccaaggtgctccgggtgaatggggagaagatcttggaggacttcagcaagaggcagcagccaaaattcaagtcagagatgctagggaggcccttctcctccagaggggcacgtagaggcagggaggggcagtggtctgggagtttcctccagcctgagggagaccatgaagtggtggggttgtagtgagggggctcccccagcctaagggagactgtgaagtggaggttgtagtaagagggcttccacagcctgagggaggcttctgggggagagaagatcttaccccagatcttaagatctgctccctcttcaggaaggatcctccccttgcagccgtgaccactgctgtccaggaactgctgcgtctggctcaggcccacccagccggacctcccaccctcgaccctgtcaatgacctgcagctcaaagatatg

SEQ ID NO: 14041 - DNA, 867 bp, Homo sapiens
ggctgaactgaccaagaggctgggagctttggaggagcctgacatgactggccaactggtcgacctgcctgaatattacagctggggggaggaactgacagagacccagcacatgatccagcgacgcatcatggagtctgtgaacgggctgaagtctctctcagcaggaagggtggtggttgtgaagaatcaggagcatcacaacgcattgggagtgatcctacaggtctcctcgaactccaccagcagagtattcacaaccctggtcttgtgtgataagcccttgtcccaggacccacaggacagggggccagccactgcagaggtgccctatccagatgacctcgtgggattcaagctgttcctgcctgaagggccttgtgaccacaccgtggtcaagctccagccaggagatatggctgccatcaccaccaaggtgctccgggtgaatggggagaagatcttggaggacttcagcaagaggcagcagccaaaattcaagtcagagatgctagggaggcccttctcctccagaggggcacgtagaggcagggaggggcagtggtctgggagtttcctccagcctgagggagaccatgaagtggtggggttgtagtgagggggctcccccagcctaagggagactgtgaagtggaggttgtagtaagagggcttccacagcctgagggaggcttctgggggagagaagatcttaccccagatcttaagatctgctccctcttcaggaaggatcctccccttgcagccgtgaccactgctgtccaggaactgctgcgtctggctcaggcccacccagccggacctcccaccctcgaccctgtcaatgacctgcagctcaaagatatg

SEQ ID NO: 14042 - DNA, 2033 bp, Homo sapiens
atgatggagacagagcgacttggtgagggggaggggagggaaatggaacggagtagccgatatggaatgaactttgacccctgacttttgacctttccccgtagtgctaccccctccagatcccctggacctaccccttcgggccgtggagctcggatgcacggggcactgggagctgctgaacttgcctggagctccagagagtagcgtgagtgacttttgaccctaacctttgacccgcattgagtccaaacctccttcaccctcctcacagtaggatctagcttaaccttgttcatctgtgcctgtactcctgtccatcccagcctgaaggggtgctggacagattacagcccagtgtacctgcagtacatgtgaggacagagcagaaagggctggggatatttttgctttgagagctgctctttcaaatgtggcatttctccgtggagctcccttctgtatccaagcaccagggcacttggtgactgagatgataggctttgagcctccaacctttcatccttaggtctgggacccctttttctaaaatcagtgagtctccaatttcagtgtgcttcatgattagccagggagctttttaaaaatgcacattcctaggtccagcctccatgtttctgaaatccaaaatctgccccaggtaattcagtagcaggtagtttttggccaagcctgattgtcctagtctgtttgacacatctgccatttctgatctgaacacaagtcccatcatctcttttgtctgcattttatcctctttccttacctaatgcctctcatcttgcccttgtttcagcttccccatggcctccctccttgtgccccagatctgcagcaagaagcagaacagttgtttctgtcatccccagcctggctgcctctgcatggtgtggagcactcagcccggtgaggagtctggaggggcttagactagggtgatgggttcctgaaggaagctgggacagaggaagaaagaagacccaaaagttactatttttctctccagaaaatggcagaggaagacggatccctggtctcttttggctgtcctgggagccccagtcccatccgacctacaggcccaaagacacccaaccacaggccagatactgggttacaaagaggtaggaggtcaggggtcatgagaaacagttggggagaaggggaggtggtcagagacaagctcagcctcattggggctctgatctcttgccttaggtcttgctggagaacacaaatctctcggctacaacctccttgtctcttcgccggcctccagggccagcctcccagtccttatggggaaatccaactcagtatcccttctggccaggtgactcttgtggagatgggatggtagaagagggtgtctttaatctccagggaagggttccccacctatctcgtattaccctcatcccatgaatccctgtctgtcctgtctcttcccaggggggatggatgaacccaccataacagatctgaacacacgggaggaggctgaggaggagatagactttgagaaaggtaaggtggggctctgagtctgagccttgaggaggaagagcccaggctatcactgggctactgctagccctcccatgtttttgagaaaattagaaaaagatattctgtccataacaacctttactgtcatctgctgggaaatttctacaacaacctttactgtcatctgttgggaaagtgtcatagcaaacatccctatctacagcatctgtcctgtaaatggtatcttttaggtttatataatgtacacaatttgttcaccagtgtgcagtgacctgatttcatgtccctatcctacagatcttcttactattccacctggtttcaagaaaggcatggactttgcaccaaaaggttagttttagtttttgagtggggtgtaggagaagtcatgtccttctcctaaggaacagagatggacatgacaaggttgaccttgttggcttgctcctcagattgtccaactccagctcctggactactaa

SEQ ID NO: 14043 - DNA, 210 bp, Homo sapiens
atgatggagacagagcgacttgtgctaccccctccagatcccctggacctaccccttcgggccgtggagctcggatgcacggggcactgggagctgctgaacttgcctggagctccagagagtagcatcttcttactattccacctggtttcaagaaaggcatggactttgcaccaaaagattgtccaactccagctcctggactactaa

SEQ ID NO: 14044 - DNA, 351057 bp, Homo sapiens
gcccgctccgcagcgccagctcggcaggcgcggggcgtgagtgtggagtgagacccgccgggctccaactccgcagcgtcggagcgcggcgggcagcaactttctccccggagcggccgtggcggcggctgctgccgtggcagccggagcggaagccgggaggaagaaagcggcggcagcggcggttgctcccgccggctcgggctgtctagctcgccgagactgccggcccgcggagccgcgtccccccgggcagccccgggcccctgccctatgtcccgcaaggcaagcgagaatgtggagtacacgctgcggagcctgagcagcctgatgggcgagcggcgcaggaagcagccggagccggacgcggcgagcgcggccggggagtgcagcctcctggctgccgccgaatcgagcaccagcctgcagagcgcgggcgcgggcggcggcggcgtcggggacctggagcgcgcggcgcggcggcagttccagcaggacgagacccccgccttcgtgtacgtggtggccgtcttctccgcgctgggcggcttcctgtttggctatgacaccggggtggtgtcaggggccatgctgctgctcaagcggcagctcagtctggacgcgctgtggcaggagctgctggtgtccagcacggtgggggcggctgccgtctcggcgctggccggaggcgccctcaacggcgtcttcggccgccgcgctgccatcctcctggccagtgccctcttcaccgccggctccgcggtgctggctgcggccaacaacaaggagacactgctcgccggccgcctggtcgtgggactcggcatcggtgagttcgggctccgtgaagggcgcccgggatcccattgtcaccgcccttgaccctgggtgttgcgtgcctcttgcccatcggggtccccgtctggtctcccagggtcagagaatcctccacttctctggcctccagagcccatctgtttgttggtccagcctccaaggctctcccgggaggtgggagggtcgggggggagggggtgtcactctagtctccctcgagcgcacgtggaatctttgataggccacggaccagtcagtccaagtggttgttgcctctcagcacttccagaaacctagctgagcaccagctctttccttgatccagcctaacctgatgctgcttcttgagcttacgagggtctctgctttcctgcactgtcccaccttgcctctccactgctagcccctttcgttttctggggctcccagcctggaacctagaccatcgtcaagttacagtgagataatatttagagttaagtaattctggactctgaaaggtttattagcgacccctgccctctttgcttatctagcatttgtctttagatggcatctccttttgcttttatgctttttctattgcctttcagctttcattcttttcccaagtaaattccattctcctctgtttttccaactttttcatttgaatccttttttatccattctcctctttgtttttcctctcctgctttccagttgggaaccaaattatctattaaaggtcatattcacttccttaattcatttaggagctactccccctgtggataaatgccccgcaagataaatgtttggaatttacttcaaaaatgaaggcattaaggttctcctggcgttgaatttttttcaccctggttgctgagcaggggaggtacaattggcaagtttttggcagagggaagctatttggaatgtgctctgtattattagaaagcacttttgagggaaagtggggggctgtgacttaaatctcactagtaatttttctaagacacaccgctgatgcttttttaatgtttcgtttcataattcagttttttgtttcccttagggtgctgttgaagtatttcttccctatggctggggcttgatgaaagcgctttaaacctggggctgctgctgatctgtgtattcaccacttgtttgatgtttgtgcttttcaccctttctctgtgggttctgaagggaagcaaaggccatatattcaactccacatgcgggaaccatgagcctaaaacccagctcactgcactttatattcaaagtttgtcagtagtgaccttccttttgctgtttattgtactgttaattagcaaaggtagggcaaagctctccgtaacatattaagttggcacaaaaatatccaaagtgaccaaaaaatccagctgaaatgaaacctatttgtgtggaaactacttgggccttcaggacccttcaacaaataacctgctgtttaagtgaccacgattcttttctcagcattgtctgcttgggacatctggaccttttttgttgcttctgacatagaaataacatcattttaggtagcaagaattgttctgtcaacctcaatcttttctgtaattttgaaattgaatcatgctttgcagagctgtctaaatgaagcttcctagtgttttgctatggcaggtattggttaaaatcttgggtattatgtttactctttttatctgacctgcgaattgagccctgttctgtgtaaggtccccttccagatgttgtgagctgaatagtgaggagaatgtattatactttagtaaatgtagcaagctggggcaaaagcaacgtagaacttgctaagctttataagataggttatcagagatggctgatgaattcagagggggtacagttatctccaacagagggaagccagaagctcttaccaatggaaatggtatgttgacatgtcagtattttaacagaaacgaggaaaggacgttctaagcaaggggcaaaatgggtaaaggaaggaaagcatagggcatacttggggaataggtggaagcagcaatagaggacaaagcaggagatcagattggaagtgttggtgtgcaagagctgtggaggcctctctgtcttgcagcctcattctgtggtctctgggctggttggttcaatagagaagcccagtttagatatgttctccattcagttctggtgtggcccatctcacttccagaaacatacctctcagaatagaagccctgaggcagtttcgtaaaagccctcttcatttacaaaatgaagaatgttttaagatcataaacaggctttgaaataggccgcattcaaaacaaaacagtaatgaaataaatccacttcaaattaggattaaaattaggatctatgcaaagcatgtaattatacacataaaatcattaaaacttacaaagaaaatcacttttttttaagctacaaggaaatgggttcctaacatgagcattttttgagggacattaaatcagtttgcttgtttggtacacaatctgggttaattttatgccattgttttttaagtagttaaattttatgtgtagtcagggatttgttgttttgtccttatgatatttaggaaatgttgatgaataacaaaatgtggcttttgatacctttttcagacaagtttgctctaagaacttctttcctccacacgtttacctgtggtaaaatatacggcccatgtgggtcaaggatttctgctcattttgttcactgatatattcctgccacataggagatacttgttgaataaatgaatggtgagcaaaaacgaaaaaaaaaaatccaaattccattgctggtcgggtagcactttaaggtaggattgttcttttcaaaccacaaaaatagtgcattatcaaaatatttgaaagggcatctaaaggttttggttgtaatagtttaatgaaatcattatctattcaacacttgctaattaagcttccattatggatcctgtcagatatggggcaggcagtaattagataaaaatcccaccctggaggtgttcattttataatggagtagaaagatacataaacaagcaattaaaagagacatttctctgtagtgccagatgacacacagaagagtaagtggtcagttgattctttcagggaaaaaaatagaacacaggattgaggaaagttctacagtgggatattcaaagtagggtttgaagagtgagtaggtgttcagcagatgatgtagatgtagccagaaaagtgcttatttagtgctttagtatgttcgagacctggtggagtactttacacatattacctcatttaatcttcctgagtctgaggaatgggtctccttttgttgggtgtggaaacagttaaatggcaaggtcactgattacagagacaggattaaaaaaaaaaaacaaacaaccttgagtcttttgctctgttaccctactgggcatttaaggtggagttaatagctggtgtaaaggcacagaaaaatcaaattagtatttgaagcatagatgagtgagggtggtgatgaggtggtcatgagactggaatgttttggggggattaggctgaatatggtttatttggagagcttttagaggtttttaacagtaaataatgtaatcagatttaacatctcttgaatctgagatgtgagggtttttgttttcccattatacttttaagctcttttaccttctttcttaagtcttctcatgtctttgaaattttgggtattagcaatcatttgctgagatggctactacaggatgggtaaagcatagcatgtgaccgtgaattactgatatggaaggagtcagtggacccttcagtagaaacctttgacaaaggcgaagatagcaaggagtagagtgtagttattaatgggtattaaatgaattgtatagtaaaagaccttaagtatcagaagtcagggatatgtgtatttgttttgatttaagggttctgttttcttgactggttgtaaaaaaaatactgcgtgcctgttttaaatatggcattattttgggttttcttttcttttttttttattggttcaccagagtcatctttggttcctctagtttatttttctcttccacttgagtcctgacactagactttctccattgtcgctgcctgctaccatgaccatctgaactttttaaacgtgaaaagtcgaatttcaaataggacatacgttttccatcccagaaatgattgtattctaacagggttaatctttttttttttttttttttttgtctgagatggaacttcactcttgtcgcccaggctggagcacggtggcgagatctcggctcactgcaacccccacctcccaggttcaagcgattctcctgcctcagcctcctgagtagctgggattacaggcgcctgcccaccacacccagctaatttttgtatttttggtagagacagggtttcaccatgttggccaagctggtctcgaactcctgatctcaggtgatctgcctgcttcggccttccaaagtgctgggattacaggtgtgagccaccatgcccggcccagggttaatcttattttgtatgttctttacacacaatcccattttcaggtgtttgtttagcagtattgtacctataatcaaggttttgaagtgtggttagttacaacaggattgaagaatatgagtttgctcatttgctttatttattttctatcattgtgtatctcccatgcataacacaaaagaaattgtctagaaaacacaaagtacaagagcatagtactgttaacactattagcatgtacacagtcagtgaaaaagcatacccattagccctttctccctggtgttggcatttattctactgcttattataagtggtgatttagggcctgtgtagggaatatcaagaaatctctaaatttgatagtcaccagtattcaaaacctttcctgagaattgacatactaatttatacagcacgggattcgttgaattaatcttagatttacatcagtttctcctgtgtcagcctctttccggactccctctacttgaacacaatttgtagctgtaaattgcagcttgtaattagtatattatggcctgttgagtaatacttttaaaaataccacattttttttcaaacagcactttgaattcttcctcagtgcaaatgaaatgtaaaatcttgtttgatcaaaaaaatgcaatgttgagatcaatgtcaacaaagaatgtcatttaaggtaagcatagttgggcagaagctcctaattttcaaatagttaatcagctaaaatacagttttggggggaggtgctcaaattttttttttttccactactccccactttctttctttttggttgtttttgaaggcaggaattctgtattggatttatgcttcctactggtgtgaaactgacacataaagcctcctttgacttcttgtatttccttgttttatacacattaacagctttgttccctccccttttctgtctggcagcctagggactgacactgcagttatagtgaggattatgatctagttgtgtttgcctagtagtatagcaacaccctcttcaagtgagttgtcagtaagataacgtaagtctgttaacgtgagttatgtgaaattgttcacgtgacttccttggaaaacattgtgctttttcattcatccattttgccctcttatggattataaacttaaagtaagaacacactcaaagttaactgacttcacactaacatctttttgaacacctttaatgatgtagaaactgctaagagaactgaaatagcaagcagtcgttgccatctttacccaaaatcacctgagtctaattttctttttctcatattgtacttggctcctttgtacatctttcttgtctacacctttttccatttctttacctttctttttcctgtgacccatcagagtaataaatagtagcaacacttcttatagcacctatttctaatagtatcaaaacttccattgtcaggaggaaaattcatactcaccagaaaaacctcaaacttttcccacatgtaaaatttaatttctctggttgtagaaagagagaaaaaagttttacgggtacttctaaactcaagttgagagtactacatgctttctagttaggccttttattaaaggccaccatttgaaatggtgcggtctgcagcatgtgtccaaggccacgtggcaggagcatcgtttcacagcagggccaagcaccgtgacagctggtcaccagcgagcaatggcaccagtgttcttctgattttagcgccaccctgccgctgcactgggaggagtctaggcagtccatcctcttggcagggtgtggattggccatcagcttagcggccaacaccctggacgtagtacttaagacttgttgaatgcttaacttctaaacattttgcacatggctaattcacatagtcttcataataacccagggggataatacggttacctttattttaagataaggatatttaggcagaaagagttgaagtaactttctcatgatcacaaagctactgggtggggccagagttcaaacccaagaggtctggcttcccagcctgtgctcaaccagtctgtgacactcactcactcactcactcctccctgaaactagcataattgttctttaccatgatatgtcatgtggacattacttttgtttgttttagtatagatttatttttttattgtggtaaagaacacataacatttatactcttaacccattttaaggtgtacagttcagtattgttaggtatattcacattgttgcacaacacatctctagaacattttcatcttgcaaaactgaaacactgtgtctattaaacacaaattccccagcctctcttccctatcccttggcaacccacctttctaccttctgtttctatgatttttactgctttggatacttcacgtaagtggaatcatgcagtatttgtcctttgttggcttacttcacttgaggttcatcatggtgtagcatatgatagagtttccctctttttaaaggctgcataatattccattgtgtatatgtgtgtgtatatatatacacacctatatatacacacacatataaaaataaatacacatatatgcatatatacatatatatacacatatatacatatatacacatatatacatatatacatacatatacacatatatagggcatttaatctatccattcgtctgttgatggacctttgagttgcctctccctcttggctgttgtggataatgctgcaatgaagatgggagtgcatacatctctttgaggtccttctttgaattattttggatatatacccagaattgagattgctggaccatgtagtagttctatttctaattttttgaggaacttctatcccattttccatagtggctgcattttacattgctaccagcagtatacagggttccaatttctcaatattcccaccaatatttgttgttttcttttcttttgacagtggccatcctaatggatatgaagtgatatggtggtttggatttacatttctcttatgattagtgatgtggaacattttttcataggcttgttggccacttgtacatttgtatatcttctttggaaaattgtttattgcattttcacgtccctgacctatttttaattggtttattgcagttgctattgagttgtagaagttccttatgtattctgaatattaaccccctatcagatatatgatttgcaaatgttttctttcattccattggttgctttttcactgtttattgtgtcttttgatgtacagtttttaagtttgatgtagtcctatttgtttttgctaaacacacacaaaactaaaactgttggagtcatttgtcatgccccttgagagtaagctttttggaagttctaataaaatactagattttacttctaggagtatgtcattttgttccctagaatacattctttgtgaaaatatattatcttcatttcctttgatataatgctttttagcagcttaacagaggcattataaaaagtaggctctaaaacaaagctcattctttatgcctataggtgtatatgtttgcattcacctcagtaagtaggaacattggtattttccttagtttaagtatgaattaaaggaagtgtagagaaattagggaaattagcactgttagtaacagtgctgagatttaaatctgatcaagaaccagtgtgcaccccacctttctattatatgataaatccagtttttgattgtgaaagcgaaatatggtcactataatgtttcgtaaattagtattagtatttaatgtgctagcaatgaaaatcccaagatgatactttctagaatttcacaaaatgattgtaatcagattgagggaacagtagtaagacagtagttatagacagaagaaattaatgcaaagaaataatatatatataatgtatagggtatactgtatatattattaaaaccagtataggatgaatggaacagaatcagaattccagtgatagatccaactgtttggaagagtttagtattgagcaaataagagggaaaagaacgaagtaactgagaagaggaaataggaatatgaatttaaaataatgtaaatgaaatttaggtctcatcttctctagtatattggtttaagagtctctaattttttttgttttttttcttatctatattgatgacatcttttattataatttttaaaacctcaaagcagagattttaaaagcaaggcaacagattggaaaaatattatggtaaatttatttacttaaaagaaaatatatttatcctcaaattatactgaatagactgtatacaacaagaaaaatacagttagtaaatagactcttgggaaagtgttaaaccttgttactaattacaggtgaaaattaaaagaacacgatacttactaaattagcaaattaaaaactcagggctggccgggtgcggtggctcatgcctgtaatcccagcactttgggaggctgaggcgggtggattatgaggtcaggagatcgagaccatcctggctaacatggtgaaaccccatctctactaaaaagtacaaaaaaaaaaaaaaattagccaggcgtggtggcgggctactcaggaggctgaggcaggagaatggcatgaacttgggaggtggagcttgcagtgagctgagatcgtgccactgcactccagcctgggcgacagagcgagactccgtctcaagaaaaaaacaaacaaacagaaaaaccccaaaaaactaagcaaaactcaggctaagttgttccctaggaaaatatgattttctgcttgtaaaataaattgcaataattttctatagagaatattctagataaaaagctgacatgtttaacatgcttcattcatttttcttcattcaacaagtttattttgaattactaatatgtattatatactgtgctcttgcagttcatttgtaaagttgctaataattctttgatctggaaatttcacttgagggattgtaatataaggaaataaagaaaaactcattttgtttaaaagtatttatagatatgcaatatgtaattttaaaaagctaggaggaacctccaagtgcctagtaattgggaaatgattagttagaccacatcacattgacattaaacacaaaaatgtgtagaccttagatacacatatcctgcaaatattaagcccaaagaatagaacctacttgtatggacctattgattgcaactacctaaaaaattacagctggacatagagtttggaagaaggaataaaggtgtatgtttagtttacatatagcacagggccttttttacattttgtttttttactcttccctttagatcattattttacttcacgcagatttttgttttaaaaggcacagacacacacataacaaaacactgtggcaagatacttttttccaaattagattttacttcttattctatggaaggacatttttaggaaataatgacaaaaatgttgcaatctaatcgtataatagtggtgtgggtgtattttttcccccagatttttaactcattgcatgaattagcaaggggtcatgatacatgaagtacatttctgggatcttactattgtatgtatctcaggaaagtgtcttgcttactttatggctgagaatgagagcttctatgggctcccattccacactccctcctctcttttgggtttcctcagctgttcctgcctgggccttgcacagatgcgtcttcttcctgtttctatagatgaactggctaaggcctctccctgtctcctattcaaagctgtcattccagctctttctcttttgtctcataaaatttcttcttctactgggttattcccataagcatggacacatgctgtaatttttgcagtcttaaaaatttctgtttctgccccactttatctttcagttactatcctatttgtctcctttattttacataaaacagttgcctatattccttctctgtagttcctctcttccctttttttctgaaccctatccagacaggctctcatccttaccactccactggcattgctcttgtcaactttactgtgccctctgtgttggtcagtgcaaggactgtcttcagtcctacttgtcctaccaaaggcatttgacacaagtaaatcatgtctttatgggccattttctttggcttttggacaccatattctcccagctttttctgtaggctgctctttcccccatctcctttgcagattcctcttcatctcccagacctcttaatttgggccagcctcagagctctcctcttctctacatttactcctttggggatctcatcttgtctcatggcttggaataccttctgtgttgcagagaactcccaaatctagatttcagcccagacctgtctcctgatctccagatgcttgcacccgacttccctgttttgtccaccatctcctgcttagcaggtcagagcattcctcctggggcttgcaccaaaagccttggagttgtccttgactacctcatgtgccccttatccagtcggctaggaaatcctttgaatctaggccctaattataactgaaatctgtttcttatcacttccactacaatcaccctgatcccaaatgccacccatctctcacttggagtatttcaagagtctgctacgtgttcaccctgcctttttcttgacccctctgctttctttttatacacatgagagccagaatgattcatttaaaatataaatcagactatgccacttctctgcccaaagcccctgattagctccccacctcagagtaaaagctagtggtctgcagcaccccatgggatctttccccatccccacttcttctttgacttgatttcctactgcttttccttccctccttttccagctgaccccgcctctaggaacacaatagacatccttccaggcctttttatgggcggtttcctctgctgggaagcctctgtccagattcctggagcactctttccctttctctcttgtgtttcctcaagcatctcttcttagcggggtcttccttgatcattcggcttaaagttgcagctcccaccaccagttttccctgctttatttttctctatagcagtttccactagccaaaacacttaatggttgtgttacttactgattgttttctctccactagagtgtaatctccatgaaggcagattttaatttttctgttttgtttattgctgttccaccattgaatagtgtagtgcctggtacacagcaggcatctagtaaatatttaatctatagataacaactaaaacagtataatcctaaggaataattttgagctgagattggatcaaggatgttgtaggaaatttgtgtagtggatggaagtaattaaatgttctctagggttgcttctgacactactctatggtttcaaactttttaaagtggttgggagaaaataggtattatttttaacttcaattaatactttgaagtctaacattgttttcagtacctgcaatgaaatgagtctctccatgtatctagggaacctaaacaaacaaaagttgatttgtgtctgaaaaatgatctgacagactctcaaggatgaacttggagtaattacacttagatgtgacagtggaatcaacagaaatgcaaacttattacgtgggatatatctattccacatgttaataatgctctaatgtctcctctctttcctggcagacagatttgtgggaagagggattactgattcacagacttgcatcttcgtgtttgaacctggaattaaagcaggagtggaaaggcattggagtcgtagttcacccagactgtaaagaggcttgatcagttttctctgaccttcacatcttctgtctgatgactcaagttttcaaactttagtgagtctttctcctggagaatggagatacggaagttgaaatctcctcttattctcttcttagcagccaatccacgtttcagattctataatacatttcactaggtagctattgagcatctgtattgggccaggcacattgtggcttgggattcaaaaaataagacacattttatttttcattatggtctgattataaatttaggggacaaaaaacatgtgtaagtgtataatgatgtgataaatttctaaagatggtattacatatgtggaatttaaaaaataagtaccataatcttgaggttgatctgatccttttaaatcatccagatttaattctggatggggttacgtttcaagtgaagccaatctgcaactcttcatagcaaatggagtggcactctcaccagtccaaattgtgataattaaaacactggtcttaatattgcattttaagcttatatttgaatatgagtgcttcaaataaatgtggaaagttacattgtccaacaaaataattaaattatgctgtgaagacttggcttgagccacatttcctggtttactgttctagtttttaatcttaccccataaaccctctatacttgtgaaaccattcttgccaccccagacagaccttattatacctctctctatgacacctctattactgcccatagtgatactcatatgtcattaatacagacagtaatagaaaaatatgtaagacacagtcgtgcagaggaaggttgatgaggtctacctggagctggcaagtcaggtttcacaaaaacctaattcatagagttattgtatggattaattgataaactattttctgttaaaagttaaacgtaattcctgctgcttattagcacatgctcagaaaacattagccattattgtagtaattaatgtgaatttttcttcccattttatctctgttggagacagacatcaacatattttggattggtgaacaaaaccagactgtcctgaattaagttttcctggcacatgtgtaattaaaacctctgtaggactgtaatttgcatattaggtagtatgagtacaaatgagttagttacctcatttcacctttatagtttctggttaaggagagaaagacattttgaaattttcgtagttcataatttgaaccttgaaatttaggattgtacaaaaagaaagggaatttaatgcatcaaatatatgacatgccattattctttgttgccagtagttggccaatttcaactttaattgaagtacaggcttttataatagtttgcaaaaacacagcaaaaaagtctagcaataagcttttaattttagatttcctccttatcctgtagaataaagttttaacaatagtgtcaacataagtaaattataaagaatctaatgacattcaagtgaatgaggatactctatttttgacctactgtacaaattacagtgcataaagtggaattcaaggatcttattttacacaacataaagttcagccatgtgccacataatgacatttcagtggaggatgactgcgtataggatggtggtcccataagattataatactgcatttttactgtaccttttctatgtttagccatgtttatacaaaaataccattgtgttacagttgcctacagtatttagtacaataacatgctgtacaggtttgtagcctaggagcagtaggctatagcatatagcttaggtatgtagtgggccgtaccatttaggtttgtgtaaggacactctatgaagtttgcaaaatgtattcctgagaatgtgtcgctgtggctaagcaatgcatgattgtatctgcatgtgcacatctttaccaagaatatcttactaaagattctgaggcagtgagttttttacttcttcatagataatataaaatagacaaatctaaaggactttatttattatgaatgaatagttcttgaggctggggaggtaagaaccctgtttaaaaaaaggtttataacctgattaaggaaatcatgaatgttgcaaaagaaacacatgactttgttacatttgtttggtaattatgcagttatttattcatctgtgcaagagatcattagagtctggattattttcaaaattttagtttctaaatatgacatgcattttcaaataaacatgaatatatattaagaatacagaattatagttattaataagcattaaaactttgcctatggatagctgctgctatggttaatagttaccttttatttgctttaagtgaacatctggctacttaatctaactcaaaatgatttatagacataaactcaaagccactgtcagtaaatttttctttatttttaagcagtcatgaagataagatacgcagagataagccatatgagcaaatagtgccttaattgttaaaaagggaatgaattctaggaattaagatgaataaacatgactagtttctagcaaaattataaaatattattaatgaagatttggaagcatttagaaaagagtctgatgattactaggaacttttgtgtgttcactagaaatatgccttattaaactaatctcttttgtttttcctttgaaaccatttcttggtgagtagattaggaaaattctgcatataaagcatttggcatactcctctttcattgaatatatttgaagaacattttctttgtgttaataaacaaaataagtgagcaaaataaactttaatctctgaaatttggccaataaaaaaaaagaagcaaacatggtttagtaggatgccttgtcagtgttgaaaagtgggcccagaaggtctctactggggtgcaatcaagcgctcagtccttcagctctgtgcttgtcaaatccagggagcccagagcaagctaaatggctgttatgcttgataacagagctaatattaaaaataactttaagatactggaatgctgttaaaaactaagaaaagttaaaattcataggaaatgtatttataatatgtatatctccatatattttacattttaaatatatttgcattattgccgttaatccactcttagagctgaccaacagtgagacagactccttacagagaacactaggagagagtttacaaagtctatacagggaggcggtcagtgtaaggtgcagggtgacctttgttgaggagatgaagaagtcttccttgtattcagagcctgactgaagggcttctctagtcccgcttgattctaaaattctcaagcttctttattgattacaattgagaaatggtttcatcaaagctgccagagaatttgtcccctgaaatggaataaatcatctgagatcctcaagattgcaaattactaaagaggaagacagtgtctctttttttgtaacttctatgagagttcagtagatgttggttggctcactgacaacacctgagttattctatttgattacttttggcttctgacttttacattatcaaattcacttttcttggatatattttaggtcttttgttatgaaatcaagaacattatgttctttttacagagagagtttataaagtacggagatgaccactctgaaagccatatgcccctagcaccctctgaagcacctcagtcctctcctgactctttcagtgattcattctgccatttgcatgattcctctgaagaaaaccaattatttagtgttcttgaggtgattgacttgcaaataatcttgtgctcttaaagcacatttttggtaaattttcaaatttctgaatactagaaattatttctttagttataattgagtgagatcagatattcacagactaatagactctcaaaaccagtgggtgctgccttcataccacacattttaccatgctaggataaacattcatcttcaatttttttgttgttaaaaaacatacttcaccaaggaatttattatcccactcattttatcacatacctcttctggagcttagggtctcagccccttcctgtctcttcttttgtgtctcccctgctacacccctaccacactttggtgtttttgaggtttcttaatcttaagtaaagtgtgaataaaaagcatttttagaaagtcttaccatgtttattgatctgtaacatgcaatatacatactgtgcttgctgtattaacacagctccaagacaagacccctagcttttctacagctagactaactcccccaaatcccacttctgtagagctttggagctgcagcagctgttgaggtaatggttactttcctcaaaaggtagccattatgatgactggcttcaaaaagtaaaaaaaaggtcttttgaaaaattgacagttctccccacaaagagttgagtgactggtcagctacaatttcttctaacttgtaattccttctaatatatgatgttgaggttttagagagagcagttaaaataaagtggtctaattagacagtgtttgcatcatctttttcagtttagatgttgaggaagtgttcagatcctaccaagcaattttttcttcttttgagtgagaactgtctatacttttgtacttagtgtctttacctgtcccccttttgagctttatgtcttaaagaaatgttatgccatttactccttttaatagattaaacttattttcaggttattgaagaaaacctgtctcacagaatcataagacaaactgtatgaaactcttggaacagtgcctggcacatggtagtatacagtaaatgttatctgctgtttcattttagttttaacatatctaccatgcacctgcctcaatggaatagtgtaaaaggatatttatacttacaatcagtataaattatagttatttgtacttataatcagtataaattatagttatttgtacttataattagtacaaattatttaatttatactagtgagttttatgaatttgtacaaattaaccccttctgagccctaggtttctcagctttatccacttcatggtggtttaatgagtattaagtagtagtacagaaggttaactggtacatgtaacctcctggtagtgttggcttactctggtctcttatgaggtaagagttccttaaggacagggaccatgtttttgtgtttatcccaggatctatcatagcctctggcacatagtagatatttatttagtaaatgcttgtgggttacataaatgggagcattgggaaggagaatgaacagaagaatgtgtagaaatttttctattgtaggtaacactcttccaggagaaaaaggttatttgaaagccacaggggtcttaaaaactcagttttttcatttaaagcttaaagcgttttgatatttacttctaaagtattacaactaatatgaccatgactgatgaatggaagaaacacagaggggtatagactggaagagaaaggagagagggagagaaagactaagagatttagtgagtactatgaaaatgttaaactctaaagttacactcttgaaagtagcttcaagagtcttagctcaattatcaggggcctttggaaagccaaataggtgattacctttattttaaaaattacttgcttttaagactttgaaggatcctttctgaatggaagatacagccaaaggtggtagtgagaggtatggaagattgaggaggatgtgtgtggttgtgtcttcagtaaccagagcaaacggcctgagattagaggaaatcaatctgaggactgggtacattttgtccactttcactgtcagagctaccaagcaattgggaggtaaggttgtagagttggttttgatgtcctgtctcaagacctaattatgcctcttgggattaggtgaggaaaatatgtgtcctgggactggccgttggtaactgcattagagaaaatgagcttgacaggtctcccacaatttggagatttctccagaaacatactgcagtattaggtccagggaacaatcctgatctgcccttggtttagaggcaacacataatcgcactacctatcagtttagtcctgacgcctatgaatgcccagttcttccttgtcattcagcttgtggataggagacaacaatgcatgtcttgtttcttctcgtatttgtaactgatttgcttttaagactgtcttgtctgaattgccttctgctgttggtgtaataagaaaaagcatgtggtgtatttaaccaatgggggaaaatatttcttatatatagagatgaaatagacatgtagctagagaataggcgagaatagacatgtagcttgtttgatggcccatgtcatttctcagatttactgctgtgtttttcttaacagctggttacaaaaacaagtggcactaaaggaaaagaccatattttcttttatcatggccacaggtgtttatttttatttatttttatgagtatataaaatgaaaagtattcagattaaccggttattcagagaggtgatatcaggtggggagtagtgggattaaaaaaaaataccctcccatgccacctgcattctgattgccaatgcatccgtgattggtgccttgctcagcatctcccaggtgccatcacttcagaagtttcccagattttgctctttcttagaaggcagcagggagggccaggcacgatggctcacacctgtaatcccagcactttgggaggccgaggccggtggatcacgaggtcaggagttcaagaccagcctgactaatatggtgaaaccctgtcgctactaaaaatacaaaaattagctgggcatggtggcatgtgcctttaatcccagctacttggtggaggttgcagtgagctgggattgtgccactgcactctaggctgggtgacagagcgagactctgtctcaaaaaaaaaaagaagatgggagtagcagaaggaatgcgggacgtgaaattggaaatcctgggtcctgctttcaaatcttttatgtaaatatgtgattttagataagtcacttaatgcttgagcttgctttctcttctgtaaagtacaagttatatgtaaagttccttctaacatagccatttcattggccagataagaaagaaaaaggagtactgtcatgatctgccacctacttaggccccttctgcaatgtgaaatggacactgtgagtataaaaacatactcaaaagtatattttttaattctctcactcaacagtcaacacaaaagacttctgtgaccaaatgtgggggatttctccccactaacaagcaatcagttttgcagcagacaccagctggatgtcctctaattcagttctcacactgtcaccctagaaatagcgtctgattccacaggttgagggcacagtcctcaagacctgccaccacccccaatgccaacagccttcagacaccggttgcaaatttgggtctctggaactttgaccaaccaactacttcaagttggagtttttacaacaccttttttgggttatattaattttctagggtggttcacagaaatcagaaaacagtttggtttactggtttatttcaaaggatacaaacagataaagagatacatagggcaagacttggaagggtcctgagcacaggagattttgtccctgtggaggtggagtcctccactgttggtacatggatgagtttttgttcccttcctgtcaacctccatatgttcatctgtcgagaagtgctctgaactcagcccttttcaccttttaaagaagtgtcataatcaattatatcattacctaggcataattgattaaaccattggcgactggttaccaacttaaccttcagcttctctccccttgtaggttgggggtcccaaccatctaatcctgccttggtttttccagtgaccaacccttatcctgaagctgcctaggggctaccagtcatctgtcaacttactagcatacaaaaagacatcactttgcagagtctaaggattttaggagttgtatgccatgaaacaagggtggaagacctaataaatatttcacactatcacagacagcaagtggagcatcaggccttaagaggagtcctcaatcctagtctcatacatttacaaaatgctaaatacataacatgaattcatttaaaaaaaaatgaagctgtaagcccagtgctgccttatagtataattttttacatttaccctaaaaacattttaactttcaatagaatgctccattggatttggtgctcagtcctggacaactcttcatttccagtgacctgacttaggttgaattttgttatttgagccagccccgtgagtaagcttggcttgctggctatttgtgtgtttcttgttatttaagacatcttgctgaagttgaagagtgcagtctttgaaagagtgctttttaatggaaaactgttgcattaaaaagtggctttgtgtttttatagaccacacaattctaagccaaatgacacagtttcaaaatagctattgatggatagaacacacaggtaagtacttgagagcctggtggcagaagttggaagtatttgtaagaagaaagcacagcatgagccagatctagagtttcctgtttgatcattttttacaatatcttagtatagatttgcagttaccctgccagatgtgtacttcatcttttattagacacattcaaatatatcagttaaagagcttttggttcagtatctgatattcggagcatttattctaatattgccttttactgcctcccaaatctatacttgtattggtactgtgtacagtaaaggtgaatgcattttaaagtataatgaatgatacctggtgttgatcgaaatggggtaagtcttccacagcctgtctctccactgattacaaccaagaactctggaaataatgcaaaatgcagctgaggattctgaaaagtaaacaacagcaggaagattgggtagggaagtcaaaatttgaagacctactggactggcagtgaatttactgtttgtatcatcttttctttcttaatctcctggcttttacctttggaggggtgagtcccaggactgctcattgaacaccaatggcagaaaagcccaacagaaaccccctccttctagtcagaagattcagaatagggacccttgtgagccagaagatatgggaggagttccccatcctttttttcctttttctccttgccctgccttgaggccagcccagttaaaaacctgcagtgctgcagtggtgatggcagtagtatagcactatggatgctgagatacagccctctttctgtacaaaggaaatagaaaagggatccctggggtctagagagtgtgggagggaatcagttattttttctctgtagtttcccttgctggtatgctgcaaggacagtcccaattatgtggaactgaaaaacagtgtaagggattaagttctaagagaaaatcctggttttatgcatagcagatttggaaaagaggaccctaggggccagaggggtcagggaagtggtggagaagagagctgaaaaaggggatcttctgtttctgtgtataagctgaaacaagtcctgagctcacccctaagcagcacatgcacaattcagacccaaaggggcacagcaaatgttttgagtacagaactgtgacataaggtactacacagtcccagtctatctcctgagtaatctgaataacatagctattgaaaattgctatttaacaagatggctgactagatgcagacaggaagaacttctcccactgagaaaccagaccatcaggaagaactgcatactccaaacagatcttcagaaagaaggtattgagagtagacagaagaaggatacagaccccgggctgaagtgggggaggaaaccctgcatggagttgctgagcaccaggacttattcctgaccctgagcagctcctggggaatgggcgagtgaaataggcttggagtggcccactctcgttacagacctctagtatcttcactgcaggagaccccataacccctatggatatttgagctggcagagacagaactccagcttgcatggatccccaggggtctggcgtgggaatggctgcagtggagcatagtcatgggtgctcatccttcaaggcccactgtactcctctaggtggctttagcctttttggctgccagacctggacagagcatatcttgctcatgggaaggggcctgtctgatctgagtgtccccctatttgctggcctatcccagggtccctgcctggccacacctgcttgcagcatggccttggttgcccagctgaggcacttgccggcagctactgccatagctcttttgttagaatatccatcctcacagagagcttctgtaggagttgtaactgattacaactcaaaactctggaaataatgcaaaatgcaactgaggattctgaaaagtaagcaacagcaggcagattgggtagggaagtcaaaatttgaagaccaacaggtatggctgaatttactgtttgtatcatctttcttaacctcctggcttttaactttgtagggttgagtcacaggattgctcagtgaacactatgtgtacatgccgtgtgcatgctaacctcactaccacactgtcactggtgcacacatgtgcagggacccctgctgccttgccgaagcccttttgctggcagactgcattggagtgttaccagcagactgggaacacctcagccccttcagcacagcaggagcttaacctcaaggggccagagaaaaaaggctgtgggcctggtcccaggtccccagggttagagcacacagcctaggaatgctaagctgagccttggccccctgcaatcatccagacatgaagccaatcaatttatacccagcttataccactgtcaaaccctcaagggcatcaaagaatataaaaagcaaaaagccctatatgaaggacagcaactttaaagattaaagaaacatcatctcacacagatgagaaagaaccagtgcaaaactctggcaattcaaaaagccagagagtgtcatcttacctccaaatgaccacatgagctcgacagcaaggattcttgattgaaatcactgaaattatggcatagaatacagaatttgcatggcaaataaggtcgtccagatttaggagaaagttgaaactgaatccagggaatctaaggattccaataaaatgatacaggaactgaaagatgaaatagccattttaagaaagaaactgttcttctagaggtgaaaatctacaagaatttcataatacagtcagaagtattaaagcagaatagaccaatctgaggaaagaatctcagagcttgaagaccagttctttgaatcaactcagttggacaaaataaaaaaaataaaaatgaacaaaacctctgggaaataagggattatgtgaagagaccaaacctacaactcatttacattcgagaaagacagagagagcaagcaacttggaaaacgtttttgtggatattgtccaggaaaatttccccaacctcactagaaaggtcaacatgcaaatttggtaaattcacagaacctcagcaatatactacaagatgtccatcttgaagatagatagtcatcagattctccaaagtcaatgtgaaagaaaaaatattaaaggcagatcaaagagtaggggcaggtcatatacaaagagaatctcattaggctaacagcagacctttcagcagaaatcttacaagccagaagagattggggggcttatattcagcagccttaaagaaaagaaatttcaaccaagaattccatttccagccaaactaaacttcataaacaaaggagaaataaaattttcttcagacaagcaaacactaagggaattcattaccaccacacttgctttacaagagatgcttaagcaagtgctaaaaatggaaatgaaatactattatctgccactataaaaacacttaagtacctagcccactgacactatagagcaattatataatcaagtctgcataacaacctactaacaacatgttgacaggatcaaatcttaacatcaatattaaccttgaacattttaaacaaggccaggtgttgtggcttatgcctgtaatcccaaccctttgggagactgaggcaggtggatcacctgaggtcaggagttcgagaccagctgggccagcatgatgaaaccccgtctctaccaaaaatacaaaaaaatagccaggcatagtggcacatgcctgtaatcccagctactcaggaggctaaggcaggagaattgcttgaacctgggaggcagaggttgcagtgagctgagatggcaccactgcactccagtctgggtgacagagcaaggccccctctcaaaaacaaaacaaaaccttgaacataaacaggataaatgcccactttgaaggcagagtgtgacgagttgcataaagaagaagacccaactgtatgctaccttcaggagaccatctgaaatgcaaacccactcataggctcaaagtaaagggatggagaaagatctatcaagcaaacagagcaagagttgctattcttatttagaaaaaaatagactttaagccatcaatggtcaaaaaggacaaagaacccaggtgcggtggctcacaccggtaatcccagcactttgggaggccaaggtgggcagatcacctgaggtcagaagttcaagaccagcctggccaacatggtgaaaccctgtctctactaagaatgcaaaaaattagcgaggtgtggtggtgtacagctgtaccagctacttgggaggctgaggcatggtaatcacttgaacctgggagatggaggttgtagtgagctgagattgtgccactgcactccagctgggtggcacagagtgagactccatctcaaaaaaataaaaaggacaaagaaggacattacataatgataaatggttcaactaaataaacagtcttaactatcttaagtatatttgcacccaacactggtgtgcttagatcaataaaacaagtttgtaagagacctatgaagagacttagataaccacacaataataatgggagacttcaacatgtcactgacagtgttagatcatcgaggcaggaaagaaacagatactagggacctaaacttgacacttaaccacatggatctaaaagacatctatacaatatgccacccaacaacaacagaatgtacattcttctcacctgcacatggcacatactctaacattgaccacacatttggccataaagcaattctcaacaaaaacaaacacaaaaccctaccaaccagtctttcagacctcagtgcaataaaaatagaaatcaataccaagaagatcccccaaactgtacaattacttggaaattaacctgtccctgaatgacttttgtgtagagtgaaattaaggtacaaatcaataagttatttgaaattaatggaaacagatacaactcacctgaatctttgggatgcagctaaagcagtggtaagaggaaagtttatagtgctaaatgcttacatcaagttagagctcagattaacaacccagcatcacacctagaggaactagaaatacaagagggagccaaccctaaagctagcaaaagaaaataacaaaaatctgagctgaactgaacaaaaaccacaggtgaaaattcatataaaagattgatgaaaccaaaagttggttcttcgaaagaatgcataagattgagagactgttagctagaccaataaagaaaaaagatcctaataaacacagagatgacaaagatgacattaccaccaaccccacagaaatgcagaaaacagaaccctcagaaactattacgaatacctctatgcacaccaactagaaaacctagagaaaatagataaattcctggaaatgtaaaacctctcaagattgaactaggaagaaatggaatacttgaacagatcaataatgagttctgaaattgaatcagtaataaaaaacctaccaaccagtaaaagccctggaccagagggatttacagctgaattttatcagatgtataaagaaaagctggtatcaatcctattggaacttctagaaaatattgagtaagagggactcctctctgactcattatgaggccagatcattctaataccaaaatatggcagacacaataaaagatgaaaacttcaggctaatatccctgatgaacacagacacaaaaatccttaacaaaacactagcaaattgaatccagcagcacatcgaaaagctaatccaccacaatcaaataggccttattcctgggatgcaaggttgattcaacatatggaaatctatgtgatttatcacataaaactgaaaaccacatgatgatctcaatagacacagacaaggctttcaatgaaattcaacattccttcgtgtaaaaaaaccctcaacaaagtaggcattgaaggaacaaacctcaaaataataagagccatttatgacagacccacagccaacattataacgaatgggtaaaacctggaatcattttccttgagaaccagaacaagacaaggatgcccaatctcaccactcctattcagcatagtactggatgtcctagccagagcaatcatgcaagagaaaagtaaaagtcatccaaataggaagagaggaagtcaaaccatatctatctacagatgatataattgtatatctagaaaaccccatactctctctccagaggcttctagaattgataaacaacttcagcaaagttttaggatacaaaatcaatgtacaagtatcagtagcatttctatacatcaataacgttgaagccgagagccaaatcaagaatgcaatcccattcacaaaagccacaaaaataataaaatatctaggaatacagctatacagggaagtgaaatatctgtgcaatgagaattaccacacactgctaaaggaagttgaagagaacacaaacaaatggaaaaacattccatgttcatggataggaaaagttaatattgtttaaatggccatatgtccaactcagtttacagattcaatgctatttctacccaactacctatatcatttttcacagaattagaaaaaactattctaaaattcatatgcaaccaaaaaagagaatgcatagccaaaaccatcctaagctaaaagaacaaaagccagaggcatcatcctaccaacttcaaactatattacatggctacagtaaccaaaacagcatgatactggtacaaagacagacatatagaggagtggaacaggttagagaacccagaaataaagctgcacactgacaaccatctgatctttgacaaagtcgacaataacaagcaatggggaaaggattacctatttaataaatggtgtttgaagagctggttagccatatacaaaagtttgcagctggaccctttcctttcttcatatacaaaaatcaactcaagatagaacaaagacttaaacataaaacctaaaactgtaaaaagtctagaaggaagcctaggaaataccattctagatataggccatggcaaagattccatgatgaagactccaaaagcaattgcaacaaaaataaaaattgagaaataggatctagttaaactaaagagcttctacatagcaaaataaactagtgtgagtaaacagacaaccttcaaaatgggagaaagtatttgcaaactatgcatccaacaaaggtctaatatccagattctgtaaggaacttaaatcaacaagcaaaaatcaaacagccccagtaaaaaatgggcaaaggacatgaacacttttcaaaagaagacacacacagccaacaagaatatgaaaaaatgctcaacatcattaatcattaaagaaatgcagatcaaaaccatgatgagatagcatctcataccagtcagaatggcagttattgaaaagtcaaaaacaaaaagcatacgaaaaacatgctggagaggctgtggagaaaaggaaacacatacagtgctggtggtggtaatgtaaattagttcaaccaccgtggaaagcattgtggtgatttctcaatgtaaaacagaactaccattcgatccagcagtccccttactgggtatatacccaaagaaatataattcgttctatcataaagacacatgcaaacatatgttcatcacagcactgttcacacagcaaagacatggaatcaacctagatgttcatcaatggtggactggataaagaaaatgtacatatacaccatggaatactacacactataaaaaaaatcagatcatgtcctttccagcaacatggatgctgctagtaacattatccaatgtgaattaatgcaagaacagaaaatcagatacttcatgttctcacttataagtaagagctaaacactgagtactcatggatgcaaagaggaacagtagaccctgactgggcttatttgagggtggaggttgggaggagggtgaggatcaaaaaactacctatcaggtactatgctctctacctgggagatgaaataatttgtacaccaaactccagtgatgtgcagtttacccatgtaacaaacctgcacttttaagaaaacatttttagcaggacccaatgaaaacataatatccaacatgttcagaatataatgcaaaggcacttaacatagagaatcagggaaatctgacaagttgctaagggaaaagataacaggtgctcactacaagatgacccagatggtggatttatcacacaaaaactttaaattggctttggtaactgtgatccaagagataaaagtgaaaacacttgcaatgaatggaaagatagaagttctcaacagaaaaacacgtactttaataaaggactcaaatggaaaatggattgatttaatggcagagagagatgaaaaaagtgagtgaacttaagacagataaatataagtaattcaaacaatagaaattacctaaaataagagggaaaatggaaaaaaaatgaaccaactcttaaggacttgtaggacaatatttggatttctaacatttgtgtcagcataatgccagaagaggaaaaacaaatatctgaagaaaaaatatttaaagatacaaggcctgaaaactctccaaacttggtgaaagacataaacttacagattcaagaaactcagcaaacttcaaatggtattatttcaaagaaagccatgcccagataatattataatcaaattgctgctaatgaaattgttgggcatatcaggagcttgtagtcaccagtctgctctaacaggtaaaaaatgggacaaattgaaaaatcagcagttcttcctggacctaaagagaagtgaggtcataggacaaaccactacccccaaaactggagaggcaggtggatacagctaaccataatttacttgagtgataaccaattaacaaagtcttccatgggaaacattgcttgtataggaaaacctgcattatagttgacaaattgctagagattcactgtggacaaatcttagattttaaaaactccaggaggacctagtaagcagaagtgggtggaggggtcttccactcttatgaatttcacctcttgctgctctaccaggttttcacagtgaatatttgagaaaatttccctttgcttctggcacaaggaagggaaaaggagccattttgaagtatgccagagtactctgttttgttttgtttttaaatgaggtctgcttcagaaaaaattagttaaaacacagtgtaagtggcctggggtaagcaaagcacccaattctagttctctctagccttttatttgagaaaaggggaatattaaactcctctaccctctagccattctgttccaactaagagagaagagaactgagaagcacttgtgaagttcccagtccagaggcacagcctcactaaagcttgagacctaatcataacactgtagagtgtttctccttctcctacaccttaccactttattactgacaatgtatttatatccgttaaccagtgtgtcatgtctggctatcaagaaaaaaatgagaagatacagtaaaagggggaaaaatgggctgaaggaagagacagagcaaacatcagaatcaaactcagatatgtcaggggttctggaatcatcagattgggaactgaaaacaactatgaataataagctaagggctctaatggataaaatagcttgcaaggacagatgggtaatgtaagcagagagatgataattctaagaatctgtaaaagaaatgctagagatcaaaaacactatgccagaaatgaagaatatggggctgggtgcagcagttcatccctgtaatcccaatgctatgggaggctgaggcaggagaatcacttgagactgggagtttgagaccatcctgggcaacatactaagactgcatctctacaaaaagttttaaaaatagctggacataggtggtgcatgcctgtagttccatctacttgggaggctgaggtgggaggatcccttgagctcaggatttggagtctgctgtgagctgtgatcacacccatgtcctctagcctgggtgacagagcaagactccgactcaaaaaaaaaaaaaaaaatgtctttgatgggctttaatagactggacatggctgaagaaagaatgtccaagcttgaggatgtttttaaaagaatcctccaaaactgaaaagcaaagtgaaaaaatactggagtaaacaaaccataacggaatatcagaaccatggggacaactacaaaaggtgtaacatacatataaaagaaatatcaggaagagagaaaggaaaagaagaaatatttgaagcaataatgactgagcatttcccagccaaaccacagatcctacaatttcctagttgacaaagcagaataaatggcagaatagctatgtgaaggcatgtcatttttaaactacagaaaaatcaaaggtaaaaatcctgaaataagccagatcataataaataatattatatattatctatataatagcaaagataagaatacctttttctcaggaacagtgctagcaagaagagagtggagtgaaatatttaaagtgttgagagaatgaagccctaccagtctaggattttgtaccctgttaaatttttccttcaaaagacaaggataaatagaaaattgcttaaacaaaggaaatttgttgccagtagacttgccatgcaagaaatgtaaaaaatgatatgtcagaaactcagatctacgtaagaaaacattggagagaaataaatgaaggtaaaataaaactttcattttttaattaatcattgatctgagacaacactttattgaaaatagtagcaataatgcctttgattatgtgtgcttgtctatatatatacttgtctatacttaagcacatatatacatggtttgtttatggttcatttccccccagtattttttctccttgcttttcagttttggaggtttctgttacatacatatatcctcaagctcagagactctttctggtgtgtacatgtgcttgtatgtgcatgtgtgtgtgtatatgtttatgcttatttatatgtgaaatgcatgacagaaattatacaagggatggatggaaggaattagcattattttgctattataaggtattcatactactcatgaaatgatctagtggcacttgaaggtggacctgaattagttgtaaatgtatattgcaaactctagggccagcacaaagaaaaagtaatgaaagcagtataaccaatgtggtgagaaaggagtgaagataaaatcacgtaaaatgctcaactaaatccacacaaggcagaaaaagggtgaatgacaaaaataagaacaaataaatgaaaacaataaatatggtagactttgatctaattgtcagtaatcacttcgaaggtcagtggtctaaatgtaccaattaaaaggcagattgcaggagtgcctataaaaacaagacccaactttattgctgtctatatgaaactctttaaatataaatacacatggattaaaagcatgggaaagatatgccatgctaacattaatcaaaagaaaataggattagctatattaatttcaaacagcagatttcagagcaagtaaagttatcagggataaagacacatgagttctataatggtaaaagtgttagttctccaatttaccttatgtgcctaataacagagtgaccaaattctcaatgcaaatactggtagaactgtgaggaaaaaatagatgaatcactattatagttggagacttcattacccttctatcagaaatggccagatttagcaggcagaaaatcagtacagacattgttgaactcaacaacaccattactcaactggatataactgacatctgtagactacttcatccaacaacagaatacacattcttccctagctcagatagaacatagaacgtagaacacattctgaactgtgaaaccttaacaatttaaaaagaatacaatcatataataactgtccttaggctacaatggaattaaacaaaatcaacagcagaaggatagctggataattccaaaatgcttgcaggttaaacaacacacttctaaataacatgagtcaaaaaatctgaataaaaatagcaaaaaatttagagctaaatgaaagtgaaaaatgaaaatttgtgggattcactgaaagcagtgcttttaaatttatagtatttgatgtatttagtaacagaaggagaaagtgctagagtcagtcttctaggctttgaccttaggagacaggaaaagagggaattaaatccaaggtaggcagaagataagaaatagtaaatattggagtggaaatgaaattggaaacaggaaattgatagaggaaatctacaaaacaaaaaactggttatttgaaaaggtaaagtaagcagagctttagtcaggctaagaaaaaaagagaccacataaattgcgaatatcagatatgaaagaggtgacagcactacagattccatggacattaaaaatgacaaaggaatactatgaataactctatccctacaagtttgataacctagatgaaatggaccaattccctgaaagatacaatatatcataaccttccaaaactgaaagcaccaggttcagatgggtttacaagtgaattctagcaaagatttaagagagaaactgtaccaattgtttagaatttcctttagaaggtagaggcagagggaatgctttctaactcattttatgaagccagtattaataccaaagccagaaaatacaagaaaactatagaccagtatctctcagatacatagatgtagaaatcatcaataaaatattataaaattgaattcaacactaaagacatataccattatgaattgggatttgtcccaagtatgcaagactgattcagctttttaaaattgatattatcacatcaacagactaaataatcacatcatatcaatagaatttcgagaccagcctgggtaacagagcagtaccctctttaaaaaatagtaaaataagaagaataactaaaaagtgacagtaatcaagacagtgtggtgaaagaatagacacgcgtagatcagtgagacagagagcccaaaaatggactttttaagatgcttagcagcatttctggcctgtattcactaagtgccagtagcaaaacttctgctggtttagcaaatgtgtccagtaggtgacagttgtccctaggtaagagggttcagagggccatatctgagaaccactgccctaatccccaccttgaagtccctgcatataaccggttgggtcttctgttcctttatataaatatgggctgatatttgtcctgcttatattccgaaggtggccctaagcttcaaatgagataatgacttggaagtgctttgacaaaaacgccaaacagagtttattattttatgtggttaggaataagaaaatgctgcaataaaaaatttttaaaggatgtccagaggtgaagggaagtaactaggatggtcacaacagaagaaaaagcattttgaatagagattgagaagattgatatttaagggaagatgtaaaatggctgttcaaaaaggatcttgttggatggcattactttggcatcacccaaatccaggttctggccttctatttttctgttctgtaaagttgattttttccttttcagttcttattgagttgattggggatagagctgattatttccattaacccaacctaaaatagacttgagaaaggaccagaatgctttttgtaaaataaggagaagtaccaagcgaagtgaagtgccctgtttagctggtcagtgttttggggttttttgttctgtctcttcttacagaagaaggatctgacacctttatggaaagttgtttggtgaacttgtaatcagaacaaagcagttatttgcattcctaggacagtgtagttggtgactgataaatgttcatgttcttttggtttctttccagtgtatagagaaatctaccaaatcaagcagaacttttcactggtttgtcagggcactctttaccctgtctctgccagaaacacttcaacaagtctctgagttttttttttttttcctgccatagattttatacagactaattggccttctaataatactctttgtcaaactaataataaatgacaaattaggttatatcatattccgtttatgcctttctgagggaatatacttattgcattcacttatgataactttggtgtttggaaacctccattcaggaatttgtttataaactacctcttaaggaaaggaaccatggtgatagtaatgtttttgtaacaatgacaaatagctctcttaaactgattgtatataagaaataatgagcagcaaaaagttaggggtgcacagtattgacatgaaaactgttgattaaacccagaatttaagaagtcatagcaagtaagtaatgtggaactgatgccttgtctgataaaaaaggttacatgcctaataattagattttaaaacatgagatatttgttagatgaataataataataataaaagctattgaaggaaaccgcttcctgtagaaactaggcacccttctgtccttttttttttcaaccatggtcctaattaattcatatattctgcatttccatggtaacaagatagcatctgtagatgctggtaatttagcagttgctaatgaattataataacaggtactattacagaaatgtcagctattatactggagaccatagttcaggagacttttcttttttctctgacttaatttcttttatatttcttgacatatttaagatgcacatagttttcacccaatttttttttattgagtggatgcaaaagagagataaatttgttactaaataccactaaaaggattgtttggaaacatttaatgaataagtataatgtataattgcattcattaagctatacatgttttttgaatgtattatttctgggaatgaataccagaaagagtgaataccagaaagactttgagattttagatacattgtatttttatctcctttttatttctctttttctttcctcactccttcatttcaacagacactaaatacctaatctttccaaaattatactagattctccttatacattatttttataactatagtatgaagtatataattatccattagctaagcacaaatgagatgcataaatgtatgcaagactgtcttcctctgcccattttatgtctagacattcctagacatggctgttcaccagtggccacatttcttacaagaagacactgtggtcagctcttgatggttcaggcactgtctagctctttctttgtgacttgtttttgggccatattcctgctgtttttacctctcatcagtgagtggatgagaaaaaaaaaacaagagatctcatattaagttaattagtttgatatttatcagctgtgtctatgattttttttttttgtagagtatgttatttttaaatttatgggaaaatttataattctgagggttaaattttctgtgaaacaaaatatttgtgcaccatgataagaatgaacaatttgcttttctcattccctggccatcttggcggctgttcttggttgggggccatctggcacctaagccaggaatatgatggtggcaaaaatgatggaaaagtcactggagttgatcaacgctaggctccaacttgttatgaaaagtggaaagtatgtcctggggtacaagcagattctgaagatgattagataagaaaaagcaaaattggtcatcctcactaacaagtgcccagctttgaggaaatccccaatagagtactacaccatgttggcctaaactggtgttcatcactacagtggtaataatactggactgggcacagcatgtggaaaatactacagactgtgcacactggctatcattgatccaggttattctgatgtctttagaagcatgccagaagatactggtgaaaagtaaaccaagcaaaataatttttctttagtaaaacttgccagaggtttatccttgtaatccctaatcccagcactttgggatgctgaggtgggaggatcacttgaggccagtagttggagaccaccctgggcaacatagtgagaccctgtctctataaaaataaaacgaaaaataaatagctgggcatggtagtggttccccgttgcccaagctactcaggaggctgaggcaggagtatgtcttgagtctaggaaatcgaggctgcagtgagtcaagattgcatcagtgtgcaccagcctcggtgacagagtgagaccctttcttcaacaagaaaaaaagaataagcaattttcaccggaagcaatctgtctatgggattaaacagtgaagaagaaagaagagaaaaagtaaatagaaaaattggattttatgctgaatattctttgactaatataaagtttggggagagagaagaaacgtgcagttgtatgtgctttaatatttctgcagtcctgaatagatgtgtaataaattagtaatttctgcagtccagaatagatgtgtagaagtaatactaattagtattagtagaatgatgaagacaaaaatgagtagaaagctatatgtttagggagacagcagaatgatattagaaattaacactaattgcatagaattagcatgtctgtataaataaaatggtttaaaaggatttggaaacaatattaaccatgtttattatgtttaaataatatactcattttattactaaagagtaaagttctttcaaataaacatggttcttagatacaaaatatattatcaacaacagcaacaaagtgagaccccatttctaccaaaataaaaaattaaaaaattagccaggcgtggtggcacgtgactgtagccctatctactcaggaggctgaggtgggaggatcacttgagcccaggggttcaaggctgcagtgacctgtgattgcaccactgtactccagcctgagcacagcgaaggaccctattgcttaaaaataaataaataagaatttatatagtaaactagcacttatgctttcctcatgcatcctgtacattagctaactgaatcctaaagcctcttggtatcaccctcgatttgcagttttgtacaccgggaaccaggtaagtcattttcccatggttacatatgaagtgtaagtggcagacctgcaactcgaatattgttcgttattgaaattcaaacatgttctgtctatatgccacataacatatatgatttactttgaatttatttaaattagtttccctaagaattgtaaaactaagtccttaagatttttaaatctcataatttgagaaaaaaagctttttgtcaactttgagatttagcttttgatagttatgtggctctgttatcttttcatgaagacttaattttcctttcattgacttacttcattttaacttgcaagcttagttcatgaaactgcctgacaaacccaaagcaatcttccgcctcttatgaatgaactcatgagtctttcttatccataggagtacacttaccacattatgcatcatcataattatgtgtttttattaactgtacttttttgtctccagctacatcactcagttccttgtattttacattttatatgtaggcatggcattttattctggttatgtgtgaaacattttcggaataagtgatggattattattgcttatttatatcttaattctacctctagaacatagtgggacatcttttcctagtgaatatttattaggcagagtctgaaggagctgatagtctttaatgctttatcgctttctttaaaagtgcatgttatttctctgaccagacattgatgtactactcaattttcctttaggatagtgacgttttagataagtagaactagcaagaatatgtgtgggtttgttttatagctagctttggggccatttactgaatgttatactcagtacagtttgttctttcactcattgcattatacatcatgagatgcaggcctgaagctttctggttgacctctttgcctggagagagtggtaggttccagggactcaaagttaaatttataaatatttaatctcaaacctctacatttagttacttcgattaggatgctctgtttaatatgtgtgtgtttcttaagttgctttgaatgtgtaagttttctaaagctttttgaaaagtgtgccaagtataaatacttttagagggactgtttagccacataaacatgaatattaggattagacagtcttgccatttactggctgtgtgaccttggatgttttgtcacacttgtgatgttatagctggttgtaaaatggggctaacaataactatttcaacgtgcttttgtgagactttgaaataaaacacttatgtaaaacctgcctcatggtaggtatttaagaaattattgtttagctcctgactcaccttatctccattgtggttatgttttgtaataaagtatcacaatagaatatttgtatcctctgaaaataattggccctttgggtcacttcaggttgtggtagagaagttataaggtgtccaagccatatagaacatttgtagagtcttagatgacagctaataatttttgtttgtttgtttgtttgagacagtctcattctgttgcccaggctggagtgcagtgatatgatcacagctcactgcagccttgacctcctgggctcaagtgatcctcttgcctcagcctcctgagtagctaggactacaggcatgcactaccatgcccagctagttttttttttttttcttgtaaagatgaggtttcactatgttgcccaggctggtctggaactcctgagctcaggcaatccttctgccttggctttccaaagtgttgggattataagataggtgtgagccaccatgcctggcaacaatagtttataaaagggcagattgtacagggtagcagagagatttgagtaagttattaacacagccagaataatccataattattgtgtactctcagcaatttattttcatgtcgatattcctgttcaggtagcctcctgtggactggagttaccttcattttgctttctgatctcactttaatattgctgttctatctcatttttttagtatctaaaatttaagcttttcaagataagtataactttctggtatcagtatatacagtatttgctgaacgaattagaaataaaaaaactgggattgttttgctgcatcacttaaggatatcaatatttagtttttaaatgctccttttaatcagtattattcagttttaagaaaaaataatttttctttgaaatgatcaatttttagattgaatttttatttgataaggtttgatttaattaattaaccatcagttacaggtttttgcaggatttctagtactataactaatgattcactgtgatttttgctgttgcttctcaccactaatacttagtcttttgtgatagccttgaacagcatccttgatggaaacagtaacaattttgatgaaatattttgctctatttgttatggtggaaagtcagtctactgagcttttcctatgagatgtagcttgcctgtgaaggattctgattttggtaattttaagaaggcaggagaacactgtgggacacttacttggaatgaagttcccttgattttaaaaagaatttccttgcactgtgggagtctgttagtctatttcagagattattgtcatttttattctttccttcttttatcaataaataatgactccatattaggtatttttatttacattgaaatatatcaaaataatgtttactatttatttttgaaacttatatgttaaaaagttaagtccactttcttgtgacaaatggattaagggtatgtgtgtatgtatgcgtgagtatacatattaatatatatgtatacacaatacacataatataatatatatattttagagacagggcactctctctttgtcacccaggctggagtacagtggagcgattatagctcactgcagccttgaacttgcggactcaagtgatcatcctgacacagctgcctgagtagctgggatcacaggtgtgccccactgtgcttggctaattttaaaaaatgttttatacagacaggttcttactgtgttgcccaggctgatctcaaactcctggcttgaagcgatcctctcatcttggcctctgaaagtgctgggattacaggcatgagtcaccatgcctggccatatattttatattttaaatgatatttataattggtactgaagaattctcatacaaaaatcactggagaaaaataattcgaagtttgatatattttgtgtaagaactgatgtttggtttttttaaaaagtaaaaaatagttaatgagattatagtcaacatttttctggggtaagctgaataaaacatgaagtcaagtctttaacatatttggatttgcacaccttaattagtccgtcctctatgactttcttgttggagtcattcttccggttataaatagccccggcttggtcatccaaatgaacgtgcatggctattgtcatttcattgctatggcaattttgcaattagtgtggtagttgctggcacacttctgggcaagggttttgatgcattgacttggaagtggaagaatgaaactgctttcacagctgctgtgtgattctgaatagagacatagcagctgctttttttttttcttcagttttttttttttactaatttagatgtaggcattatgcttcgatgaattgttggcaggaatatctccttgttcccctgtctgtcaaaggaaaactaatttggatttcaagtaaatattggggcaggttgtttgtgaaagtttctttcactccttgtgaaagaaagtagtcctgtaactggtttttctgtctatcctttatcttcaaaacggaaatgtcacaagttgtggaataatcagtaactgacaaataaacttcactgggagatttttagttattgaaatgtatggatttgtcccatttctagggataaaacaaaaagttgattggaggcattaatgagggcgtatctatataaaataagttgtaaaatagataccggaaaatggtattaatagaatcattaatgaaggggtatctatataaaataacttgtaaaaatagatgctggataaatgatatttatagaagcattaatgaaggggtagctatataaaacaacttgtaaaatagataccagaaaaatggtatttatagtggctagcttgctattaacttttttggtcaatgtcacttaaaatgtgagctataatggctccttattcttccatcaccaagttctcataaagatagataaagcagggtagtaaatcagtctttcaaaaggaacactttcctctaaatttagagcataattaatgttaatgtcaccctcgaagatttgaggaaaattttctcctacaactttaatttggatgtttatagtaaaccctttaattttttttccaagagcttattacttttcttttaaacatggaaactcagtataattttcttctagaaatatggaagcttatacaatgcagtaaaacttagtttagacattgatttctctgctgaaagtactcctaaaatatcttagagagttgatgttttaagttacaaacgtcttcttctattttttcctgatagtcctcagatatatatgcttttttttctgttttgcattatgagcaaataattagtacttctttacatcagtatccatgttcacaagtgatggatcttttgaggttttgggatttttttttcccctgaagctacaaaaataagaaagtaagaaatttagtttttttcatgaataataatcttgatttctgctcaggggactatcctctaccatcagctagggcagattaaattgaagattgcaggatttctcattataaaactgtagcctcacaagaccacctatctgatctcttaaaaacttaataagcttatttttggtatgtattttttaacacatcaatttttaacaattgacttttgtatgtaataagaagtaggggttcaattttatttttttacacatggatacccagttgtctcaccaccatttattaaaaggtccatctttcccccctgatctacagtagctgttctgttgtatgtcaagggctgatgtgtgggtgtgtctcattctgggttttctattctgttctaatggcctttctttttctgtatatactgtgtttattatagtagcatataataaatctcgatatggggaagaagtcctcctttatttttcaagagtagtgactaatcttggcccattgtccttccagcaaggatcaacttttaaatttcctttttttttttttggattgtcaaatttgaaaacccccacaaactcatttgggttttgatgtcaactgtattaaatctgtatgtcaatttggaaagtacagtcatcttttgatgttcatgggggattgggttcacgaccccacttgtgtggacaccaaattctgtggacgttcaattcccttgtataaaatggtatagtattggcatatgtccaacacctatgcttcagtgtaccttaaatcatctctagattacttgccgtgcctaatagaatgtaaatgctgtgtacatagttgttacactgtacctttagaactttgtattatttttgattgtgtttctttcccagaatgaccctctatatttctagttatgttttttgcctcaatgtttatgttgtctggattaatatggctatcttcactttcttttgtttagacttttctctgtttgttttttatccttttgcttttagtcttgttcctatcattttaagttatgtttcctgcacaagactaaagtataaattttaagtccagactgattgcccttctttttacttggtacatttgattcatttatatgtattagatctaccattttctgttgccttttctttcccagcttatttatgctgctgcttctctcctttttgcctttttgaattgccttgcttgtgtgtgtatatatattttttcatacaattttttctcaagtagtttggaagttgtatttgcatgtatttttagtagttgccactgaaattttactcatacatatttaacataacaaaatctgaagttacataatatctttatctttattctgaataatatatgcaacttaaagcacattaactttctttaaccttctcccaattttagttctattgttgtcatgtcttttgattctcttctcttgagcttgcatttatgcaccacaagataactgttaatgactttaaaatttattttctacatctttatcattttctatgctcttgatttcttcctgcatctttattcttgcactatccatttgggatcactgtttatctaaaatacactttcagaatttccttatttaggaattttgcccttgttcttgaaagatacttttttctgttggactagaaactaagttgattgtgcaatgaggatactattttactgttttctgggttccattgttactgttgaaaagtcagctgtggtttaataaagaaattctagcagcagtgagaatattgagtatgcccaaagtaaagcgattatttcttgtttcctacttttgtatttaaaacaaaaacaaaagctaaagcaaaaaaacaacccagtgtacatgggaattttcctttctgcgttgatttctgatccctttccataagtatgaagataaacacacaagcttaaggttgaacatacctaaagaaagaaaaccttaggattttggggatcctttacaacttgccatgacaaatgtaacaaaagaaggttttcaagtttttgcatttactgctacttatttaagtagttttcatcaagttaaagtcagccctttgaaaatgaatgtaaattatctttagccatatacctatcatatgttatttacctgtcatccattcatcatccttccacatctgtctatatgtctgtgttactatatgtctgtgatatgagctgtctgtccatcgatgcatccatccatccatccatccatccatccatgcatccatccatccatccgtccattaatatagattttcatccacaatttctggcttacaactcccatagacctttgttacagtctttttaaaataatattggggccctttgggccccagaagtaggatcaggaaacagaatctctctctccctggccttctcttgatctcctttcactgtccaagacaggactctaatcttccattgtggattataaggcccccagtccagagagcatcctccctatacccttggaggaaggaatgccacacagaagggtcaagaagaatctaacaggcctttctgggtttcctcattcattctgttagtgtaaggtcataccctttttgtccgatcacattttgatatggttatctatgcttcaatcatgccttttcaatgaagtctccataaaaggcccaggaaactagctgaacacatggaggttcctggagggtggcacattcaggaagggcatggaagctccgtgctccttccccatacattgtcctatgtatttcttcatctatatccttcatcatatcctttagaacaaaccagtaaacaactttccctgagttctgtgagctgctctagcaaagaaatcaaacctaaagtgggagtttgggaacaccagcatgaagctgattggtcagaagttgattgttgtggtgtgagagcagaggaaaaatagtttaaggttttccatactcaatgtgtatctgttttatctatctatatgtctatcttatctatctgtcatccagttttccatctacttcctctgtctcctctggcatagggtattgactctgtataaatgaaatgtattgaaatgtgccattagcatacttgtagatggagagtttgtaaaaatctaataaaaagggataagacaatggagctaggtgttttacaatcaaatcattgagtagcagcagtgccaaaagttatattacctcatcatatgtcaaagaaaatcactacctctattctggctgtgtcagtgtctcagagttactgcagcagaaataagtgataatgccagcattcatgccagctaatttgtacaagagctaggctctgttggctgagtcacagctgccactagatctacaagtagagtgaaaagatgtttattagccatggagagtaatacatgggtttattttaatcaacttgttctaaagccagcctaagagagatgatactgcccttttcacagtcatctgactcgttcatgaagtgtttgtcatataatgtagagtctgtttctcagaatattatgagccatagttacggcatcttgcttatcacccttcgtaaatgttaggtagctatataatctttttcagccctacaggaaaaagtttgttcaaatgttgtaaaatgtttcaccataattagtgcctgccatttcaaagaactaagcaatttggagttacatgtatatagctggtttactgaagaacaaaatatgaaattgattaagtccattaaaataattttggctgcatagtaaagagaatcaaatgacgttccctctcttttttttcagtccattcccttttatctttagtgagatctagctttatgatgaaagccaggtgatacagaactagagctccaaaaaacagactttttgtttcattttaggaatgcaatttctaattcttctcattgctctgtaacaaacttttctattttctaatttaaaagtatcttggaagatcaagtgcaaaaggtatgcatgtagaaaataattccctattttatagttataaaataagggaaagtgaaggttaatttggctgtgtttttcctcaaacattggaaaactgactatagttagaggactatgattgccatggattatcatcgaagaccctgggaaaacaagttatgtgacattgtttgtagatcttaaaaacatgcctttttcttctgcatgtttacttcgttaagtttttactatatatttatagtaaaatatatatagtaaatcaatctatctatctatctatctatctatctatctatctatctatctatctggagagaaattttcaagtgtaagcagcatagggacatttgtatgccctagatggaaagataatattgtaagtggttgatgaagataatatccgttggtgggtggcttttattatttttaccacttaaaaattcaaaggccaggtccattcagtctaagtttcagacacaggaaagaattaacagagatctttggtaattaaggtggacattatgttgccctataaactgtgcttctttgaaagttgaaaaaataagcagaaatttttgtgtaaaaattattcaggcatagtgttccaactgcgtaaaattcttagccattgttatcacatgctagaacagaaaaagaccagttaatgctttgaagttgatatcagagaggtcaagaaattctatcagtgtagctcaagaaatatgttacttagaactaagaaaatagaaccactggaaaaatggttaaggaaacgctcagcagtgtacccatttacctggatttctgtagtccaaattaagtaaaatattaaataaaacactcgagtcacaataatttttcctcaaatatctgcagttgttgctctatgtcatttcatattacctactttttattactttatggacaagctgttttttcttcctgccccacccataaattttttttaaatcaatttttattaaccttgcaaatcagaaaattgtataggatgtttccagctttagcacccatacctgagttcatttatttttcttataatggtttctttttcaacaatatcttttatcattgcaatttcctttgctttctgctcatggagagcatattaaattgatgttctatacttctgattcagacttcacacagcttcatttctactctttactgtgtccagtatggggtttacttttgttattattatgtattctgctattaaattcgtgtgtttttacagtccttccttatgctactcatttccctatttaattttagtctattgtctttttatttgattccctcctcatggctcttcgtttctgctttttttgtttgtttgttttgttttgttttttgacacgaagtctcgctctgtcacccaggctgcagtgcaatggcgcgatctcgactcactgcaagctccacctcccgggttctgctttttaggcaaggtcaaatcatcttataaaaagaacagcttgaaaaaatggtggagactgtgttcatttattattttgcaactctagtatttccttcaatagtttattctattttactcctcagccctttattgtatgagcatttctatagctaaattctagtcctgggctagtcatattctgtacatattccttgtgcatttcattgacacctatgcaattatcatctgtattcaggtgattcacgtccttttagctctgatttaggccacactgttgttcttagaacatttgcctctagatgtcacatagagttaaatatgacaaaacaccacttatgctgttgcttgttaaattcactgccttggggaaagcatattgatttcttattaacctttgtgcattccacttttcaggtggaaatgcatactgcttctgcttatgtagcacttcatacagtgatctttcccatgtttttataacctcttaaatctattttaggaaatttcttgaatatcaatttcttattttgccatcacttccagtcaagaaattctttctttctctgtgtttttccctggcctttctcatccagtgttgttctctttataacactactattcttaaacttaatttaattgatgaatactctctccaaaaagcagaacttatttccagtatctgaaagttacaggcttcccattctaatgtgtatgtaagaatctagtatggaataagaagggaatggttacataagttatatcttagtattggaatattatactgttatttaaaatgattttgtactataagggtgccaaaccagggtttgttgtatgtggctctgtagagatgtgttttgtttggctggtgtttttttttgttgtttgttttgttttttttttgtttgttttttttggcctgtggagtgtgttgtaccttagttgttatgcaagcagcttaatatcttccactcagttggtctcctatatttgtggtacctgcctagcttatgtaggaagtttgagaccatttttggaaaagaatattttaaagagaaggaaaatgctgtatgagtgaaaactatagatttgtagaaaaaaatactgacagttataaacagatttaaacagtggttatctatgagtgattagaggcgatttttattcactttgcttcttacctgtagtttccaaattttccctaatgaatatcattagggaaaccaatcagttaaaaccaatcagttaacactagtttaaaagaatatagttttgtgtatgcattccatagtactaatcaataactttttattaatcaataacttagtctacgcccttaggcttgacacttaggcaacttatagtacagaagatatgtgaaatctgatcattccattaacaggcttgtagtcctgcttggagagacaaacgtgatacaggctctactgggatgttaccagtgaaaaaggacatagacagatagaagattctcaagcaatctaacagaagtggtcattttagccatgggagacttcactgagttgaaaggctgatgacatgtttgtgatactatgttaagagctctttaagtttgtagaccattgacgttgctagttatctccacagagagaatctttcttataacctgactcttctgttacaggcattttatgttggtattttgtacactttgaagtttcccagcatcttttctgagtgtcttaagccttattagaaaaaagtagaaactgaattctaaattgttaacaacctggtaaccatagatacttgactgtttggaaaaaatgtaaacatatcagccctgagcaagacagccaaaccaaaacaaccacagcgagggattctgattcctttgacagactctgtttctttttattaaaagtatttctttagagatgataaagcaataatttgcaaaatgaaattagaacatcataatccttcttgttcaagaagcattattattaaaaggtagcttcatgtgctactaagaagctaattagttgttgcctggcttatcatgctgagagacagctgtgattcatgggtatttatctatcacaacaggattttctaatggtatttggttatgaaattatttatacttctgactcaggcctttaaaagggcttccagccgtttttgaaagccaacttctgcactccagagcgttttgtgctgttgagatggtgaatcagcttggcagtgtggtagtgtgtgaatccggtcgcactgcagtgtctgagatgcagttttctggtgaaacttctcaagccaagtgcgataatgagtgttcattgatgtagatcttataattttgtaggaaattttctaagaaactgagctttttcaaaatatttagaaataacaccaacatggatttttgtggttatgtttactctaataagctgttaataggaatttataccattatattccttgtgttaatttcaatgtgtgagtttagtatggactattaataacttgttttttctttatcaggcttttattttatttggttagtgattagaataggaaagaaatcaaaagctcttcatagaactctcctgaactttaaatatttaaatcatatttaaatattattcattacattcatttttaaagcacctaactcttcattttgaagatctcaaatcatcatctttgagttatagtaccagagcaaaaatgtgagccttgatatattttctttctttaaaacaggttttaggtaaataacaggagaaatttttgctcatttatttgaatatttctgtggcttatataaatcaagggctgaattacacaaatacataatagtgatttgaaacagactctaaagttaagcagtagttttacttaaccatcccttcttaagtagaataatgagctttgttgagggacaaaattccatttgttttcccaaagtggaaagtagattttggggtgacaaagccttcatgttcaaggttttccacaagtgagctccatgtttagaaatccataaattatagtttgcatgggttgcttttattaacagcaaggtgagttgttaacaggccctgtgcctaacatgtgcgtattgggcagatgtgagtagactgagcacggatcctcctactttcccagtttcataaagcggttttaaggtttaaacttgcctagtcccaaattatacaattaatcatactcagttgtcatttttcttactaattgttccaagctctttaacatgatgtctggtggcagtaagtcacttagcaggcaatagtggcagggaagagagaagactcttttgcccctagaagtttatgtatgctagtcaaagtaagaaggtcaaaaataaaatgtttctaagacatttccaaaggatcacataggcatgacacccagcccttgaatggcacattacaaaggttagaggacctagatctgtgagacccattttgacattaacttgccatgtggctttctgaaaatctctttatatctgtctctggggctgggcatcattacctttcatagggggataataaattatatcagttccaccagcctgtttataggatttttttttttttttttttttttgagatggagtctttgctctgtcgccaggctatagtgcagtggtaccatcttggctcactgcaacctccgcctcccgggttcaagcaattcccctgcctcagcctccagagtggctgggattacaggcatgtgccaccatgcctggctaatttttttgtattttagtagagacagggtttcactatgttggccaggatggtctcaatctcctgacctcatgatccacctgcctctgcctcccaaagtgctgggattataggcatgaacaaactgcgcccagcctgataggatgattttacatgataagacaaaatgataacatagaaagcctttaaaaataacatagtattgaaaggtaaggtagatatttgctcgtcatgaaccttctcagttccccctcctagtcccttaattgttggactgtttcaggattctattctaagcattcttctcgtatgccattgagtgatcttatccatttccgtagtttcagttatgcgcattgtccccatagtaccatcctttgagctccacctagttgtgtaactcccaagccctacctggccgaatgtcagtttgatgttgcatttgaagaaatatagtccagcaactaaaagcaatagtaaggcagaactgctcttaacttatttctcttgaagaatataatagcatgtagcttacaaatcagcattatttcttaaaatcgctgtcatctcctcacttccctgctcaagggttactccctttgttacaggctcccattttccccagactcaccccgagactctcactcacaactgttttttgtcttttttggtcttaacttctcccaatatacctcatgatttgcccatgttttcttttctccaccctttttttgcttagcatgataaaagctcaagaactagactgacaaagaccaaattctcccttgaggataaaggaggagacaggttattctggcgaagaccttattgggtaggggaaacagggagggggtgggaccactcacatgtaaataatctgtattcccagcacaccatcaagcaggccacttactatctacttctatatttcacaaagtgcctctgactcaattccatctatgacctgaccttattatcttgtactcaaacttcattttttccctccctatctttgtacaaagtgcccatcatgctcctagttgctttttcctgacatcaaaacatcatcctcagcttccttctctctttatccttcacatcctattcatattctctttaacctagataccaaagacataattctcaaatctcttcatttcagtccatcaccattgctgccactgtacgtgttgcttccctgcaatcaattttccgtactccaactagaatgatctagttgatcctgatcattgaacctgatcatgcatcttcctcttctaccctattcagaggcttctgcgcactaagcccttaatttggcctttaagatcctttacactgtggttgatccttgcccatttctctaaaagtagtccgccaccccttcctcagcaggatgcttttcgtcctgcctgaaggcccttacctaagctgatctgattgtctgcagtacctcccaactctcccctatctccaacctactctcacttacttattcactacatctcagcttaaatatgacttctatccaaggcccctctgactcttcaggctgggccggtccctttgctatagtctgatgttcctcacacttcccctttggcaatacccatcccactcgactagcagaccctaagctccacgagaacagagctcatgtctctctcctacagcactatctccaaagtgctaaacacagtgcccagctcagatccagtgtctgatgaatactcactgattaatggatgctgcttccatgacttaggcgccctctgtctctcccatcttatctgcacacatattccgcctcacattttctatttatctctcagaaaaccccgtgtcatttcatataaagatttaagctcatgttctgtgcagaattgtctgcccaacctttccaactaccacctggtcattgtcagcttgccacagtagaatccagtgtatagctttattatgacccttaccatgttattttgaagttatttacttgattgtatgcttttgtgagtaggtcttgtgtgtactttccttcatagcagggaccctattttatttgtttgtactcatccttataatcctgtcacctactatagaaagaattgggatgcctcataactagagatgataataagaataaaaataattgctgatcttattgactaccttctgtaagccaggcacaattttaagtgctttacttaactcattgaatcctctcaactcctatgaagtagttacttttattcttcctattttatagatgaggaactttagacccagaaaagtcaagtaagttgtccaaacttaaccagctgataagtggcaaggctggaattgaaacccactggttccagagccttcccttacttatgatgatccgtcaatatagtttgtgccatcaaaattgggttttagaatcttgctgtctgctttaaattctgattcttctacctactcatcatgtgacctgaggtatgaaaaatggagataattacatgccctttaaagggatatcctgaggattaaataagattattagtccctataaaatatctgctgaatgtaggtagttgttgcagtgttaagtcagccagagcactcattggacagaaggtctttcatggttctttccaactccaaatccaatgagtctgtcttcaatctttaccctttgtcagtacgtattactttcaaagctctggtgtttgttttaaataatcgaactttatcagggtctgaggacatacctgcatttctgtcaagtaaaatctatgtgttttttatgagcatgtgttgcctaaaaccacagtcctgatttcccatgctcaaatctggggctacatggctaaataaagatctctgtctaaagagaacaaccaaattcctgtttatagtcagaccatagcagaaaaagaaatccaagttgtaaattattgtttgaattatgaaagtttgagatgttctaatagtaaaagaactaaagagaatatacaaatcccgtgtcaacatttgcagcagatgtttgtttcctctttccaagttagatgagggcatttcagggtggtctgtgttattaaattgattagcagtcaaatggaaacttcagctgcttaggtgatgatttaattgtgaagactgttaatactgtgtctattagcacatgcttattattctatgaaactcaaagtcgtaagattattgacaggcactacagtagcaaacaacattggtggaaattagtatctagttctgagacttaatggtttgacttgtgtgcaaatttaataactacttatcagtagttatgcaataatacagtgaattttcccaaataaatatgtattacttaaataaatcttgcctatctgttcatctatgtatttatttgccttgttcaaagatgtaacaaagcaaataaaaatagaggaaaaatacacttataataggataaattacaactgttatggcattaggagagagtttgggtcacaaaataataccttgaagtccaaaacattggatggaggtgggcctttctgactgtgtacataaaaagggaaatgaaaaaaagctgcaatttataatagccatcaactaacaaaaatcacctgtagaaaaccacaactattgcagttactgagaccatagagaaatgtcacttgctgtatggaatgtaataaatagcaccttcaacagcacttgtacagaaaacacagcaacaggtttcttagtactgattccttcaacacaagctgtttttttgccatcataaattcgttaaaaagcaattagttaaaagcaattctatatagatctgttttattcattttattgatgttctggcttaatctaaggattgatttatagtatctagagatataaacattaaattttttaggcaatctttttttttttatggaggctttggtaagtattgattagatacagcaaatcagtatctgtccaacctttgggtaaggctgaatactataacaggctaaataatactaaatactaaaataggctaaataatcagacatacatggaaattgcaggggccacaagagggtgagactttaagaaatcatttggattggcttaaagttctgtactatacaactttaggtttttaaatacacagtaagtgtcaagatcactctggagaattttaaaaggacaatctcatcccccacctctgtagttttctatttagtaggtctgaggtgggtgaggtaagagcaattttatttaaagaaaaaagtcacatgagtaattctggttatcagtgaagttagaactactgccatagagaatactgcattaatttcagatagaaaaaaatttaaagctaatataatcaaatacaccttagctgtaaaactcttttattctgaaatgtatacctagccaattgaataaggtgatttattatatgaatttcttattagtaaaccaattaaaagtttagtaaatctactggcatctaactatgtctttgaatagttaatatgtatcctaagataattttttattctcactattgtctgattacatttccatatagactaaaaatatttcagtaatcattctatctagagaactttttttgctatttttagtcctcaagaagttataaagcatacttatatgcactctgaaattatcttaggtctttaggggtgctttcatttgtaggctttcaagtgataataagaaaaatgatatctcacatacatttttacttgtctgcagtagccccaaattagttatgaacaaaatcttaaatatgtggtaaacctttgcttaaagtagaaaaccaagcccatatatgtaagtgtatgcctaaatctagcattagtatttattgcaacagaaatcttgagtaaatgtctcacatttacttttcattgtttttataggcattgcttctatgacagtgccagtgtacattgcggaggtctcaccacccaatttaagaggccgattagtcaccattaataccctcttcatcacaggagggcagttctttgcaagtgttgttgatggagccttcagttatctccagaaggatggatggaggtttgtaaatactttttacatttaatttttcaaatcttgattttggggaaggggagaaaaattgagaaatcatagtcaaaatatagctgtgtgttttgaatcattattgctaatttataagtaggtgacattcagcaaaactgagagtggacaggaagctgatatttattttgatgatagacaaggaacctaccattaagaattgatatttacagggcttttttagcatttaggtgacatttctcacactgtgtgcaatcttttgcaatatttgtttaaaaatgaatgcagtgataaatatgtatggagttcatgaattctacaatgattgacaagctgtttatgaactacagatataactaacatcctttttgcattctggaagctacattttgatctgaaagaaacgtagtgtttaaagataaaaatatacctctataaaaagatatacatgagtttaaagtatacaaattattccttgatatttggcttattttgaatcaataaatgacaaaagtggttttaaaactgctttaaaataaatacaaactattattaaaacaaaatcttatgttaaagcttaaaagatattatgggctctggattttgatatctttatagtactcatgtaactgttccagagaaattttattaaaaggcattagaggttatacaatattgcctatcttgttttcttgcctctacttattagaacaaatatttattcagtatttacttctctgtagatactggggaatagaatattcaacaatataaactcaaacccttgtttgcatggcttttacagtgttgatgttaatcctcaacagtagaagaaaaaagggtgtggactgggtgtggtggctcacgcctgtaataccaacacttcaggaggccaaggtgggcggatcacttgaggtcaggagtttgagaccagcctggccaacatggtgaaaccctgtctctactgaaaatacaaaaattagccaggtgtggtggcacacacctgtaattccacctacttgggaggctgaggcaggagaatcgcttgaaccctgaaggcggaggttgcagtgagctgagagtgtaccactgcactccagcctggacaacagagcgagactccatctcaaaaaaaaaaaaagaaagaaagaaaaaggtgcaatatgatgtggacccagggaattaaactgcttgtaagaagcacgataaaccttgtggcttaggatgagccattaaagacctaaatgggtgaagttttaattaaaagtcatgtgagaaaactctttgaagctaatgagggcctacatttgtaaggaccattaaggggaggacacagtttttaaaaacggttgttgtgtctgcagatgttgctaaactgaagcaggaagtttctttcttcttttttttttttctactcagtagatgaagagaaagaggaaagacgataactgttttcagtataacctggtattttgagtttttcttgtaaatgcaatggaagtcagtctttcaacttacatgtctttaagaagttctaaatcatcaatttatattttgttaaaaatttttattaatgtaagtaatatagatatattcaaatgcatagcatgtatagttgcataaatcacatttttcacttacgcataacaattaagaaatcttttctcagtcctggttaggaaagagaaagatctcacagtagtgacaatacatttatgaatgtggtgtgcccgtgtaaaagcggaggtgttgggacaagcctgaaacccccttgcagaggcaaggagacatcatagacagacctggattcaaatctgttttttaccattgattagataagaaccccaaacaaatcatttagcccctctgagcttcacttttctataaagtagaaccagaaatacttataagattattgtgggatccaaattacttattatatgtaaagtgtttagcgtagcacttggcacatggcagataataaatgaagaatcacattgttagttgctgttctgatgaattgagtaaaagatggatgctactatcgatgttgtaagagaggctgaaggaaaatcaacattctgtgttatctgttttctttattggcaagaatgatgcttcaagatggtagggcagaagactagagaaaaaaagatttaaagtgtattgctgctgtgggaagcatgagaaggaaaagactagggacaacacatgatttccaagtaaccatggaatcccagctgaagctggagacatatatttgcagtaaagccaattagcatgctcatgtttatttttctggcaatactggattgcctagggatgaaaaaataaaataagagtatgggaaaactaactcccgttgatatatagaccaaagtattaacaaccagattgttttgaacccaatttattctttgcatgaatacacatttaattatgtacacatgcaaacatgtttccttttttttaggtgaattttctctgttattgtcttctgttatctagtatccttatcagtatatttatctcatctgactcctgggctaataggaatgtggttataagcaaataaaaattgaagtgctaccttagcattaactttagactctgtaattgtcaacaattgataacttattcataattataacaatagataactcatcacttttatagcaatatgtttcaaaaatcttaaggaaaaatctgaaggaaaatgtgggtctaaatatatcatgtaaaatttcttttccatactcatatttttatatatcttcacattagatgtccccagtcttcaaataatttgaatattttaaatttgttttatttccctttttggcttttattgcttctgaaactctacctcaagtttctaatattaaattttatactacaatacccagtgtcccagatttactggtcttgcattatagtgatgaacagtttcagcgtctggtagcaaataccatttgatcctaaccaaaatcttgacaggttagtggaattggtattattctcattttgcagattaaaaacttgatgcttagagaagttaaatatttgcctgagaccacatggctattacttggccttggcagagattagattcaaatcttcttattcaaaagctaactcctttcttcctcatggttctgctttcaagcgtttataatctaacagccataatttttgataatttttacagtagtgattggattaagacagatggaagatgaaatcgattgacagaaaagcaatttagattttgatgttgtagaaacattatagttcaccttttatgccagatgggtcaaagtttctgttctcttattttttagatatcatagaaataaattgttttctgctgaacaactggaagtttactttctctagaaaaaaagaactgccagtagcagaatcaatgttgctatttttctggcacttcattatcatagtacattctgtactgggaaggataccatctggcttcatgaagaaagaggaaataaaattttgaaaatattgttaaagatttgattttttaataaaaacaactttattgagatgtaattcatgcaccattcaactcatccatttaaattgtacaatcacttggcttttagtgtattcacagagctatgcaaccatcgccacaatcaaatttagaacattttcgtcaccctaaaaagaaaccttgcactccttagccatcaccccctaaccccccaagctgtcccacatttaggcaaccattaatctactttgtgtttctataggtttatgtattctgtatatttcatatatgaatatgtggttctttatgactggcttctttcacttagcaaattttcaaggttcatctaagttgtagtatgtgtcagtacttcatttctttttatagcaaataataatatggatataccacattttgtttatctattcatcagttgataggtattgttaacattttggggctatataaataatgatgctatgaacatttgtgtacaaattttaggatagacataagcgtttacttctcttggatatacacctatctgtggaattgctaggtcatatgataactgtatttaggtttttgaggactggccagactgcttccaaagtggctgtattattttgcattcccacaagcaacgtatgagggtttcaatttttccatgtcctagtaaacacttgttatttgtcttttttgattacagtcatcctagtgggtgtgaagtggcatctcactgtggttttgatttgcatttctctaatgagtaatcatgaggataacttttttttttcctaatatattgtagtgttgacaaagatggcagagatgtttcgatagttaatattaatgataaagttctatcgctgcttgcccttttctttgcatatgtatatatttgcattatagtgacgaacagtttcagcatctggcagcaaataccatttgatcctaaccaaaatcttgacaggttagtggaattggtgttattctcattttgcagatttaaaacttgatgctcagagaagcatatatatatatatagtttatttttatttttagtagagatgaggtttcaccatgttggccaggctggtctcaaactcctgacctcaagtgagccacctgcctcagtttcccaaagtgctgggattacaggtgtgagtcaccatacctgtcttctttgctaatatttttaaatcttacttcatgaacatagtgagatttactcactacacttcaagcaaacaaaaaatatccttttttgaaaattgcttagttaaatcctggcttatcagtaaatatatagtaagtgaacttagccatcagaatgatctgtctagaaaacttatctgggcatgccactagtaaaatgtttcaagactgtctatttcctacagggaaaaaaaaattaaattctttatcatggcttgtagtacccaatccatgcattcttttcaagattcttctaactagtgttgcccccgactccactttgtataaaacccaagcttataaaccaaccatatcttgctttgtcatgtttctagttttttttttttttttttcattcttatgctcttttttgcctgtagtgtctccctaccctatccagggattctggtccagctcctgttcatcctgtaaatctctgctcatgaatcatggaaactctgttcctttgtcttttcataatagtttctacaaagctccatttttatactcaccatattatattcaactacttgcttactcttctatctcctctcattcattttggaactcctgaatgtcattgaccttttactcatttttagatctaggaagggcgcagaacatagtaaatattcagtaaatgtttattgaactgagctgaaattcactgggctctagggaagggactcttagttagcataaaaagatatttattataaaccaaataccaatgtattaatttatacagagggatatatatacttcatagatagataaaaattaaatcattaattatatgtgtttctgcaggtacaaataagagaaagaaaattagtttctgagcctatgaaaatttatctccttcaagagaatatacctccctaggaacctgaaaactttcattattttctctttggtaatgctgattttcaaatgagtgtctctgtgtttacaagtatatagtcatcatgtgatttgtattaatagggataggtatatatacagaggggctaaatttttctgtttcatgctgatttttactcatcttattcctagatctactttaaaaaaaaaacaggcttatcttattccacctcactaaactatgtacaaccatttgttaaatgtctggttgtgctagtcattttcatgtttcatcatttaattgatgtaatataggtattgaatgagaaatacaaaatattagtcctgggaacctctataggagagattttcctgagtatcctgaggctgactcatgcacaatgtgagacatgctgagttttgaagaattgatgggactcaggtggacacaggtggatatgggaggcagagtgtagaccaggagggggtaggatcagggaggattaagactacagtgatgatgtacatgagaggctgaagccagattccaatggtctatgaattcaagtccaacttctgtctacaggcaaagggaatttattatttttttagcagagtgtgccatgacaggagtcaaagatcactacggcagtgatgcccagaactaactggggctctcgcctcttgggtagatttaggaaacctagttatgaggctgctgccaaggtacaggtgtgaggttatacttttggagtcatcagttggtgtggaaataattcagtcattcattcaaaagagtttcttgacactttctgcatactagtcttgtatttaatactagagatggaaagatggataagaagtgctcctcctgtcctgaagcctctaatggcctaatataggagagagactttttttagtctgttgaataaatgatggatatagtgtaatgggagctcccaagatgaatgaataacttagcctcacaacagaaagatatttgagctttttgaataaaagaattccaggtacagtgagggagagggaaattctaggtgaaatgtaatcttcaaaggccctgtcatctgaaagaaccagtcatgcttggacaagagtgagaagttagagcagctaggaggagggctatgatgatcatctgggagtttgggggtgaagtgggaaggccggcctttggtgggtgtggatggaacttgaaatcctttgctctcactttcataacacattagatttgggtttgtttattgaaagcctcaaaaaagaccagcctggccaagatggcgaaaccccgtctctactaaaaaaataaaattagccgggcgcggtggtgggcgcctgtaatcccagttactcgggaggctgaggcaaagaattgcttgaacccgggaggcagaggttgcagtgagccaagatcatgccactgcactccagcctgggtgacacagctagactccatctcaaataataataataataataattttaaaatccatgtcaataagatgcttctcagaatgatatttaaatggggatgttatttctaaacaactttatgctggagaatgtgttcttaaaatttcgtgctaatagatcagtggtacttggctctatatgaaatgtagaatatgagtcaatcactatcttaaaaatagaagtatgcagtggtcattttaagaatgatagatttagataacacatgtattaattggtggcaaacagtctcattacaagtaaatacctgccaggtgccatggcttatgcctgtaatcccagcactttgggaggccaaagctggtggatcacctgaggtcaggagttcgagaccaccctgcccaacatggtgaaaccccatctctaccaaaaaatagaaaaattagctggatatagtggcacatgcctgtaatctcagctactcaggaggctgaggtgggagaatcttgaacccagaaggcagaggttgcagtgagccaagatcacgccactgcactccaacctgggtgacagagtgagaccctttttcaaaacaaccccaaaaagtaaataccttagtgctgaagatataaatacgactgtttatcatgaagatattacagtgtggtgggaagaatatgtttaagatttgctttcacagcgtatgaattaatttatctaagctctaatagtctcacctagccagtgttccagcagtcatacaatgttatttacgggatcaaatgagctagtagcagtgaacatacttacaaactcttcagtgctattaggtattgtttgctgttatcttcagaatgttttaggttaagtctctatattcggcatttaagctggcaataaaaattgctctcaccttcagttatctgatttttttccaggaaaatgtaaacatggtttggtaatgacagagcagtttgtataagtctaattcccctgaagatgaccattataaaacatggacagaatgtgtgaatgtatggagcatggaagatatttaggatagtgaaaatactctttattatactttaatggcagatacatgccattatacatttgtccaaacccatgaactatatagcaccaagagtgaaacctaatgtaaactttggactgtaggtgataatgatgtgctaatgtgggctcatcacttgcaacaaatgtcccactttggtggaagatgttgataattggggaggctatgcatacgtgggcaggaagtgtgtgggagatctctgtaccttcctctcaattttttgataatagcaaaagagttggaggcagtaaatggaattatatatttgtgaagcagtatctctaggtagactgataagtgaaagatgcatgtttttatctgtagaacaatgactagaatatattacaaaaagaaacacataagaagccattatgagcattaaaacgtaatacttaaaatatttggataagctgaataaatgcaataaattaagaacacaggaatgaataagagatggcacaaatagcaaatagcaaaatggtatacctaaaacccatttatggtaataatcgcattaaatgtaaaaaattattgtgtactaaaaatgtggcacagatctacattgtctaaagagacacactttaatgctattagattcaaagtgaaaggttgggaaaagatgtaatatacaaaagtgagtataggaaggctggtgtggctatattaatagtcacacaaagtagacttctagagagacagtattagcagagataaagaaggacattttctaatgacaaaagagccaagtcatccgaaataataatgatacaaaatgtgtagtttatctaataagatagcttcaaaatacatgaagcaaaaattatcagctggcagttagccagcagtgtgaatgcacttaattctgtagagctgtatacttaaaagtggacaaaatggtaattttatttatattttaccacaataaaaaaatgggcaaattgagcttatatttgcagaatttttaactcttttttttaacaacgatagaacaactagataaaagattataaaaaagcagtacaatactattaaataccttgtcaaaactgacatttgtagactgctacatccaacaattgcactatacatattattttactttcccttttcctttccttttccctttccctttccccttccctttccctttttcttttctttcttttttttttttttgagacagggtcttgctctgtcacccaggctggtgtgcagtggcatgaacatggctcactgcagcctcgacctcctgggctcaagtgaccctcccgcctcagcctcctgagtagctaggactagaagtacatgccaccatgcccattaatttttgtattttttttgtagagacagggttttaccatgttgcccaggcttgtcttaaactcctgggctcaagtgatccacccactttgggctggcattataggcgtgggccaccatgcctggccttatgaattatttttcacatttacattagacagtctccagaattcatcatatcctggggtataaaataaatgttagtaatttattaaataaataaatgaaatatatgccccctgaccacagcagaattaaattagaaaccaataacaataagatagccagaaaaagctgcaaatctttgtaaattaaagtagcaggttctaaataattcatgggtctaaggagaaatcagaaggaaaattggaaaatagctttgaatggaaagaaaatacaatatattaaaatttgtgaaatgcagctacagcagtgcttagatgaaaatatgtggcttaaaagtgattgcagtagagaagaggaaaggtttaaagtcagtgatctaagtttcatgttaagaagctagaataataggagcaaattaaacccaaacaaaacaaataatgaaatattaaagagcagaggtcaatgttaacagttggttctttgaaaagattaatcaaattgatacactggctacgactgattaaactgattaagaataaaaagataaagtacaaattatcaatatcaggaataaaagagggcatgtcattctatggacattatgaggataatgaaggaaaaatttgaacaactgtgaacaacttggtgccaataaatttaccaacttagatgggatggtcatttgcttgacaatcacaacttaccaaaaatggacatgaaatggaaaatttgagtatccttttatttattaaagaagctacatcattattaataagttacctgcaaagcaaattccaggcccatatagaattttttttttttttttttttgagacctgagtgccaggtctcactctggcactcaggtggctggaatgcagtggcaggatcatagctcacttacagcattgaccgcctaggctcaagggatcctcccagctcaacctcctgagtaggtgggaccacaggcacatgcaaccacacccggcaaatttttgtattttttgtagagatgaggttttaccttgtttcctgggctggttttgaaatcctgagcttaagcaatccacccactgcagcctaccaaattgctgagattagaggtgtgggccactgcacccagcccctggtgaattctataaaatatttaaggaagaaatagcttcaatcttaaacaaaaactttaagaaaataaaggtagaataaacacttcccaataaggtttttgaagccagcataattctattactagggcctgagttgttacaagaaaagtaaatttgagtccaatttcatgaactcagaccaaaaggtatccttaacaaaaaattaataaaactgaaccaagcagtatgtaaaaggggaataaatcatgacccaggaaggttggttggtttagcatatggaaaaataatccatgcaagtcaccatattgaaattattcaatggaggcaaatctgtatgatcatctcagtatatgcagagaaaatatttgagagaataacattcatttatgataaaacctttcaggaaaccagagtagaagatgacatccacacaaaaaaattgcagccagctttattctcagtggtgaaaaaatgatgctttcccttatgactgtttgctaggcaaagatatccactatcatcacttacattcattcaaccagaaaagttgattctaaattttttatggaaaatcagaggacctagaattgctaaactatctcaaagaacaaagttggaggattcactgtctaatttcaagacttattataacactaaagtaatcaggacagtctggtaacagtagataaatgaatcagtgacatagaaggaacaaccatatgaatgaattttttaaatattgtgctgattaaaagaagctagacacaaaacagtacattccccatgattccatatgaagttcatcaatgtgcaatggggtcagaaatttgatcagtggttgtctacggcaatggggattgactggaaaaggggtacgacagaacttcctggaattatggaaatgttctctttcttgattgagatagtgtttacaagggtgtgcatattttcttaaaattcagaatggttacaccttggatctctgcattttcttgtatataaattttacctaaaaataaattaatttcagccttatggtggatttctctgttatattcctgttctgcattgaccaatgaataacataaatgtttctgccagaatttttttctaatagcttctgttggaataactgctctccttaactcctcctacactgggcctaaacccccatcatggcagttaaagaatcctattttgtttgatgattactggagtataggttacttgaagcaggggatgtctgttgatcattactgtttctctataatccctagctcagagcttttcatggatgattctcagagtttggggggaaaaaaggatatgtgtatatttaagaagtgtgtacattattttcagcaacagtactgtgaattttgtgcaggtcttaacgtattttaccatgcagtttaaaactacttaatatttgtgcaaaatgccatattcattgatttcaacgatatcacattctgtcagagcatattttacttcttccactataatcatgacattttaaataaccctggccaagccacttatatgctgatattagtttacttggtggagtcttcttctaagctatgtagacagggttaatattttgttatgtttacttacctggcaattagggtttgtttgtttacagtgtatacagaatctttctcgaggtaacacaggtgttgatcatttgcggatcatatattacctgcttttaacgtgaaagattccatctgtgcacattgaaatttttcttaggtaccttcagccatggtcttatgtttattctctagctgccatctgattatcaagtgtatcagtcatcagggtgcatgtcttacatggtccttggtggcagaggaaaagtaactttccagcctgggatctcaatgtggcaatgttttcttttctgctaaaatagacttgtgaagcatgaactaaaatttaaaaatatgttaccaagtaagttgctgtaacataactctagcaactggctaaattcagtgttatctgtttgcatctaaaacttttgcattaagtagaaacatattacataaatcataactttggtgaccatgttatcatgtaaatatctagttattgatcaataacgatgaccatttcttttgtaaatccatggatagagatctttcagtaaacacatcactcatgtgattattccttcagtatatgaaaaattcaaaattcattggaacattgaacaatgtagttggatagctctggatgttagactgagggcacagtgttcttggatgaggttgaaggggtttgagttatgcttttttaaggggaaaatgtttcactgtcctgtttatcattggaaagttccagctcggggggatgccatctctgggtaagtttattcatgatgctcagtgattagctgtagtgcttggcatttaacatacattcaggagatatttgctgggtaaatagctgagtaacagctcagagaaatcacaaggcttagctttccaagcaaacacaatacatcttcattagttagtgttttcaaagaatctattgattctaattgctaaccctttttattttccgtgaactaatgcaggaaaaaaagattttgagtttattttatagttatttgtgaaagaataccaacttgaagctatagaattttaaagaatacatcatcttaatatttataatattcctctgagctattcagaatgggctaacatggacatgatttgttaatcaatagcaaaagtgcaagccagaagacagagtggaaataaaacttaattggaattacagatacagttttttcatttcctttttttagtttaagacagtattggatattattagagaatttgctagaaagccccactgtactcaggatgacatttcagagattgtcagtgagccaatcttagtgtttcagaaagtatcaagattaactgtgactaaaaagtatgaggtggttattttgcttggaaccacagttttgacaacatgaagttgggaaaccagtaaggaagtgatagttgacctgtaccttaatgctttcatggcctgttgggaggataattgactaaatgagtatggtgtctgaaaacctttactgtgcctctcaaagtgaaaagtgtcttctcttagtagaattcagctcctcaagggctacaaaaacaattgcatgtttttaaaaaatacaatgtagtgtaataaacttcccttaactaggatagtttttccattacagcttgacttaaaatgaaaaccacagatcatatagatcttccagtgtaaggcattggcaactttttcatgtcatttgggttaaggaggaacaggaacataggggagaagggaaagaaacagagcacaaatgcgggatgcagttgttcactcctgtacaatttcttcaggaggagtgaggcttggggaaacctttgggatgcagagattgaaaaataaagagaaagcaactttcgatctatcatattcatcatagaaaatattttcaaaggatcaaatcctttaaaatcttgcagtcgaatatttttgctcctaatggttttttttaaaaatacctaccttcttgttatccaaatttttcctgtatgaaaagcttactagtgtatgttaaagaaacattaaataaaactttagtttggcacagtggtcaaaagaagcagtacaaatttaccctttacacatgaggtattttaactagtagtcagctattttaacagtaatgctcttagggagttttgatttagtaaggataggtgttgagaaaatcacaggatattccatttcctcctagcagttctgtgttatttaaatccagcttgcagttacccagcccagtgggtggtactgtgttgggcacctgtgctgggcacaattaggagtgacagctcccagccagccagctttgcttttgcttttgctttgttatttctgcagtgttttactgcatttaacagaggtgagggaataatacttccaaagggaacctctgaattctttaaacatgaagctaaggtaaattaatgcactttttaatgtgttctacagaattaattatcaagtaattattgaacagttaatatagcttgacttacaataaacatttattgtaggagccagacttcctggattttaactgtagttctgttgcatactaaccatgtatcttctttgtgcctcattgctttgtctataaagtggggataataatggcactcgcctcatagggttgttgtgaaatcatgggagtaaatgtttcctaactgttctgaacagtgcttggcacacggtaactggtgctacacattagctgttactattgctattagtattgttgttactaaacaattacatgtctatgctgagattgtgcattcaactagattttcacatatttggaacataatcatcacacctctggaactacgaaagagcagataacatgctaactcatgttatcagttcagagaggaggtcaatgatcgtgaagtgcaaaattctgtaacttaaggaagcagatatgagaggattattgtcgttagttacataggtgagagcagcaggattgctttaaaacaggaatgagagtgaatgtttagttcagtgaagaacctgtttggtttgttgtgaggcccctggccatctgatggaagagacagcaggcttgctcagctgagccatagcaggaggtctggccccaggaatgcaggatccaccattcacagagcttccatctctggaattgagaaggcttaacctgaggtgaaattggtgggattgttctttgttgacagctggcctaaccttgtcttttggaagtattcctctgcctttaaatggcctgctttggtaggcaggtgctggtactgctagctgtgccagaaaatagttcattttgtaactgtaagtttagaaaattttaaatctttagatgagtgatcatgatggtaaagaacatactaaagatttaaaaactcatgagagcttggcatgtctgcttgactgtgtgtttgtctggtgcgcttgcttgtccgtagaaggtaaatggcttttgccgtaaggtgtggaccttgggtgcttgttgttcatgtttaccctgggttttaaaaacatttagatccttggttctcagccacaactgcacattagcaccacctggagagcttttaataaaacaactccctgggcccagagtccagatcaattaatcaaaatccctggggaagggtggggcctggaaactggtgggttttaccagcctcctaggtgattctaatgtgaagccaggtttagaaaccctgacttaatttagaataatgagatctcttgtatcaataggagactacttgcttttctggggactgcctgccccagtgtatcacaatactctgtcattcatctaattcctgctttccttggatttagaggactggtagtcctactactgccttagtttagtttatgaagagccttctctttttgtctcatgttgaaatttttattagtaccacagcaaaacagcctcttatttatctttcctattctccagtctgcacatcgttagaggaatgtttttcttaagaaagaaattggttagttgtacctgctgaaaatttagttgggtgatacagccagaacaaacacgttacagtgaattgattgcgtggttaggagttcagggaggtgaaacattttttccgagcatcctctctgccttggtgaatgatttcacttaattcccccagcagtcttatgaaatagatactgtcacctgtgtgttaaaatgttaagtaacttggccgaaagcagtggcgcgtgcctgtaatcccagcactttgggaggccaaggtgggcggatcacaagatcaggagtttgagaccagcctggctgatattttgaaaccctgtttctactaaaaatacaaaaattagccaggcgtggtggcacgcacctgtagtcccagctactcaggaggctgaggtaggagaattgcttgaacccgggaggcggaggttgcagtgagccgagatcgcgccactacactccggcctgggcaacagagtgagactccatctaaaaaaataaataaataaataaaatggtgtaagtaacttgaccaggttcttgtggtttgtatgcccggagctgaagtgacacccacatccattcctgtgtcctctctgtcatataagctctgatcttgtgtattgcatttcttcaaagccatgaaaattattcatatcaaaatattttcatcgtgaaaggtaattaaaacaaaataagctttctcattttacttttagaagtattaggatacaaacgtataaaacatttttttattgactaatctctagaaagaagctttaatatgcttaaggattggcaggagggtacaaattccttttccacacgttagggcaacggaattgtacatttcggacccagactcttgcacagatttcaaaaggtgggaaggcctattctgtcttctgtagctcacttaagaaacacaggctaatatatatgtctgtattttccttttctttttgtcttctcttttctcttctcttctcttcccttgtctttttttctgtttaaaaaaaaacttgtaaaaatactgcatcctgggatttaatagcaagtagcagagtgcaaaatattatgtgagcatcttggacctgaaaatgattcagtttctacattcatttcagtgctttttgaagtattatctgctgcttttctatcttaattcatgatctttctttggaaagatcatgagaagtgtagataaatgaaacataaaggctttcacctttaggacttttaaaatttatttcctaatccagtatatttagggtctaccttgaaaaatcccttttaaataatgagcaatatagtataaacatgtctttgacacagctcagatggaagttttattgatttacagcaataaaacatacatttaaataacagattaaattataccagttaacatcttaaggggaagaggccagaagtacatatttttgtgagctgatctctgtagctctcatccgaggactcttccagaagagacggtccagttatatctagaataatgaatggtttggttggaaggaattactgagcaagtaaatttgcagagctaaatgacccagaagagttgttacctaagatattgtcatataaatccaaagcacagttattttctggttagttaatgtagaaagtttagatatacaggtgcttatgtgttatttcataaaatatgtactcaatgcctactgtgtgcaagttaactaaatgctatgttgaatacaaagttaaataatattaagcaattgattgggatagctaaataatgtattataatacaagatacaaagacataaattaaggttaaactgtgtgctctgtgggtgagcagaggcaggagtgactaaatattggtgtaattatcacaatccatggcctaaagcgtaagacacctccaataagatttaacactgcaggccaactgattcatttagccattcattcataaatagtttatttactttccatatcctggttaatttttctgtttccatgtgtagtttaagtttgtaatttgtagtaggaggtattcttactacccatgtaataatcatattttttcttctactggttttttaattaaaatgaaattgcttggaaaatagcagacttattttgtgagatttatctctggagcctttaaggctactatcagtttagcatagcttaaaaggtagaatagctttgaaaaatatattgagccaagtgacttccatgacttatgcatatcagtgtggtttgttatagaaatagaattggcctcctgagctctattgttaggaatctaccctagaacatacctagagaagttggattaacagaaaacattcaggtatcgtagatgcatggaagtttccatttgaaagacagcttaaattttatctaattcagcccctttggttcaaaaagatggaggccttagagatgttaggaaatcagtctggtgatcataatttggagagatctttgatatagatatactcattactatttttgttatttcttggagggagttaaaatgatattgttgtttgctattttgaattttgccagccattaagaatagatatttaaagagataacagttaacttacaacaacatgagcagatttttattaggattattgatttctgactccatctttttttttcctgtgggcccccattcctcagttaatgatgatgaacatgatgcttgatggcaaaatgaaataggaaaattgtaacaacaaaattataactaatgattcacaagtcagaaataactataaagaaacaaatttgggcacttattttaatgaaaagtgtgccttttaagcagatatcagaaagttttatcgtagccccattttatattgtaaaatacaaaattacatatgttagccttacataggaatggtgattatgatgttttgcttaatatatttgggttagaatgtgtatacataatgactgtagcttttgctcattctttttcaatgtaatttgtgggaaaggtagagaaataattagatttttctcattttttaattttcagtgcagcacaaaaatatccttttttcctagtgacagacacacacataaatgcacaaataattctggctaacttcacagtaagtattattgttgtcaacacaacacaaaagtatgtggtgagcacatgatggtaagagcaaattttacagtaaatgtggattttttttctttgcaggtacatgttgggacttgcagcagttccggcggttatacagttttttggctttctctttttgcctgaaagccctcgatggcttattcagaaaggacagactcagaaggcccgtagaattttatctcagatgcgtggtaaccagaccattgatgaggaatatgatagcatcaaaaacaacattgaagaggaggaaaaagaggttggctcaggtatatagactttatacttatatgaatttaaaaactatacagtggtcttatttgtcattattttgtgtgcgtgtgtgtataatatatttttaatatatgggtatttatgtataaatatggatatttatatttatacaaaaatatccatatataaaattatatatgtattattgaccttccatattcatttaaaagctattgaactgttttcaaaataatctttgtaaaaaattaaaatgcttcgtttacatgtgttacattaattttcatactaatttttataaagcgtatgagtacctcatgtactagtttagggataagtttgtgtttccctctttccattaaaatatttaattcattgtctattctgaaattcaccatgtcagaaaaccaagaaaagtctcatgttaatttatgttgatgaatttatttttgaagaagatttcacatagaaatgtaccaaacaattctgaggcaggatctataatcttgacagtctgatttgggtaagtgatttgtaggatgtaaacgaggaaaaggtagacatttcaagatacattttttcaacaataacaattagcctgctcacttcacatttcccaaattggtcttattttctcttgcgcttccttttgcctctacattgttagctcaaggggagaagcagatttgtattagtcaaattatttttcatacctgagaaaatgccaagcacacacactcctttgctgatacatgtctacacaggtgttagaaggtctgtccagtctactttctcctaccatttttggtggagctgaccattgttgccttcctgaaacaacaggatgaacactctgaagaagctggtctctgtgttagccacacgtggcttgatttaactttacctacctgtagcatgatagcatgatgctgtcactttgttgctgagatcaaagcctcaacaaactgtgagcccattctatgtgaagttcattttttttaacgctttttgagcatcagccaggtgtccagcaatgtcagcatttctagagtaacatattagtgcaaagattaaggagaattttgctttaacaaaaagttttacttttactgagttaaacatcgtgttccttaaaaaatatcttaaaatatctatttaaatgacaacttattttatgctcctgtctaaatttctcttctcagtaactcaaatgaaatatgaattttttttttttttttgagatgaagtctcactctgttgcccaggttggagtgcaatggcgcgatcttggctcactgcaacctccgcctcccgagttcaagtgattctcctgcctcggcctcccgagtagctgggattataggcatgggccatcatgcctggctgatttttgtattttttgtagagatggggtttcaccatgttggccaggctggtcttgaactcctgacctctggtgatctgcccaccttggcctcccaaagtactgggattacaggcgtgagccaccgcacctggccatgaatttgttttaattgtagtaattcatacatttgaaagttatgtacaaattatgtgtgagtggaaaaacttttcagagtaagagaaaaattgttaaatactatttagagcctgtatttttcttaatttatataaaggataaaaatttaatttttaaaagccttcttgtttagggatatggatatcattgattttattgcaaagcattaaggatatagcttcattttgactgcttaaaaatatgtctgactactctagccatgcagtgttgacggtgtatcctatttgagttttagacattattcggaatatataaccaaatgaatttttaaagaaatctggggtacatagggttgcaattatcaacatctgctttagtttttatcagaagtctttgggagctaaatagcacccctttgcttggatatagataaaataattccctattccccagttttgttttacattcacatttggcacaggtttttaaaaatactataatgttattcactggatcctaataacgtttgctcatgcttgagtaaatattctaaactttggaactaataggattattaacctatccatttctggatttgtattatttgaagtaatatcatcttgcttaatttaaaagctaatcttaacgttctttttaaaaagtacgcagttaagagcattattgcatgaatgcattcagacagatttgccagattacatggcaccagtgattgaggacctgattttttatgattaagaaacgtgaccacagtaaaacatggtctgcagaactgtgaattgtattatcagtattgtaatgtccaggagcaagactctgggtcagtttaattggaaaatagagagttaacaaactgacatggtcttgtccctccatcatgcttcattcaagaacgataggctagatggacaaatgcacataaaagaatggctaacttcaaagtaataaaaatgcactggcacagaaaagatgaatcagccattgtgttgaagggttagggaatggcctgttaatctgtccatggatcctgagaattttgatccacaacatcaagcctgggaactgtgggcaatagagtgcagctacctgaagggaaccttaatgtaggtaccacaaattatcctgatattccaggaatttagaaagacgttgtttaagacaccctatttcttataaggaggaatgtgttatcaaacatggtggcttagatacctgttcgcattgagcttactaataaataggtctgattctggatcagtaaaccatgtcttatctagcagttccccagtggatttgtgacttgtgacggttatggcacttgcatatgtgatccttctcttttcataggaatttttttttcttgttcacttgaatttaaacttgacctctgtgaggaaaataggcctagctactgaagtgtatattggctacattaatttattttttggatgtgtgagattgttagtgcctagagcatttttcttggtttaaaaccacactttatatagtagatatggcagttgctctggccatgtcagcagcaaagttgaggcttccaggccataccatggaataaggttggagtgcaatggaatctcatctcttctgcccatggcattgaggtcagactcatttgcatgacatccaatgtcttgtgtgtttttttccactatagttggcaaaacaacaacaaaaaggcagtatgggaaaagaagcaaacatttggttttcacgtgtgctcagcactgttgatacatcctgtaggaataataaagtaagactagcagaaacaacagcttggtttggagagctcgctggagtgggagacagggagatggaagaatatcactggctgtgtctcaaacttgccatcttaaatgaatctcgggagagttgccgcgcctcagtttctttttaggtttgtaagaaaagaaaaccagattataataactccaaggtctgtttttttaggattttgaaagtctctgagaagtgcctcctctttatttctaaatgctgtacagcagtatttctttcaaaagtatttattgagtgacatgcatcagaggtggggatgtggcagtaaataagactgacaagattctggtccattctcattggataaggcacacaataaatgaaagagcaattaactactagataactacaaattatggtaattgctttgaaaaagatgaagagaataataaaatgcttatagagggaatgaaaaggggtactttacatgggatggttaggaaagcctctctgaagagatgaacttgaagggtgaaaaggaatcagcaatacagagaactggagggaagactgttccagaaagaggaaacagcaaatgcaaaattctgttttattaagtgggccagattgatttttgcaagttttgatcatagctacaaagtgtacatgtaccagacttctaagatattgcagtaagaactaactatacatcttttatctcaggttcccaagcctaagtgttaaattagtagggacacaattactgttttcagaattgaaagcaaatttaaatacaaagaaacattaatatgatttccatcattttgtggtatgtctggtttgttttcctagtttatatcatattgcatagatgtgtaatagagtcatggcctgtattatcaacagatacagaatcctgatagagacataggtaattacttaagcaatgattggcaaacttttctgcttagcttcaaagttgagtgaagagaggcaggccctttggggcctggttattataacaggaagcagctgtggtaagctcaaatatatttgaatttttctgctttatcctagaaattaaccaaagtttgcattctgttctataatataactgttttacttgactgtaaaccgtttttttcctaaatagttccagttttcattcattggcttcatggaacccatcactctgtcatttatatccctgggatatgtatccctcagtttgacagacatgtcctgaaagagtttggagtttctctcctgggcaaattcattagagatgatattaaaagtagggtctgtccatgtcactagagatgagaagtcatttcttggattactgggcatatagaaggcatagagtctttgttaggagctttagttcctgaaagttaaaaattgtctctcatgacaaaggaagtaaaatcaaccaacagaagagacaggattcttctgaaggcagtcttagggaacaatccagaaatgagaggtgtgttttcatgtgctttatataaccttgtttgatagcacttatttgacttctttagtttcttatcctgtaccagcgaacaagtgtaccctgagaggagatgaaaggaaagcaaaggctgttgctgccatgacttgtcagaagaagccccctggccccgctgcaggagcccctcaagcacagtttctgggaggtcttagataaggcaccatctctgtcatcctcctctccactctgaagtgggcgtgctaaggcaggatcattggatgcttaaggcaggatcattgtgctaaggcaggatcattggaaggaaagcatgaacaacaaaagcatgaacaacaaaagctttctctagagaaacatacagatggtggtgttagaaccactgcaaaaagctagggaagctagggaaattaaaaagcagtatgtttagggagaatgaggttattaggacagcatcagtgcaatgacagattgagtaaaggaaggcaggcaagggagacactgactgcatgccttagggcagtaaagagcagccttttataaatctatttatagcatgggttcaatccaaggaacttaaaaatggtcatgggctttttttcccctaaaagaaaatggctttttttggggggggaggggtgaattccatgttaaaaaattacatattaaaacttttttttttttttgagacagtcttgtactgtcatgcaggctggagtgcagtggcacaattttggctctttgcaacctctgcctcctgggttcaagtgattcccctgcctcagcctccccagtagctgggactacaggcatgcaccactacgcccagctaattttttgtatgtctagtagagacggggtttcaccgcgttggccaggctggccttgaactcctgacctcaagtgatccacctgccttggcctcccaaagtgctaagattacaggcatgagccacaacacccggccttaaaaattgttttacagttaatattacctagatcatctagatcatgtactttcagaatggacttattaaacagaagaatgccagccagaatattggccctaccctttggtcagtaaaatctcaacatttaatcatataggagaagtagcaacccagaggcactagctaatgtttcagattggaattagatgcaggcccactagttgctagtcactgtagtagggcatttaggttacctgtgtgatatgtaatctatgtgaaaatatgcaagccagcaagatttccattatttaattttatcaacaaatgagtttaggaatctgggtgaacgttggctttgcctttgacaaagagtttgatctctagcctggaaagcaagagtattgtagggaagagaacttattcaggagcttcctgtgagttcattttaaaacatgatttgatttacctccagttccttgggggtcatgtctgtcatgtataggaagggacagctgcatctcttttttttttcctctagtaattttgcaatttggtcatgaagtcttacctaccttcgtaagtcattttctttttttgtgaattgatattgactgtggccctttcagcaaatcatattctgcagagaggtcagagggggtaaatatttatcgtattttgatagaaattcttctgtatgtttctttagaaatccaatttcagcataatgacactgcagtcaaatactcgttgcaattgacatctgctgcacttagaggaaaatagtcattctctctaatatatttggtagtttgcttttatttttttcatgtggtagtactacagtgttatctgacccaaaacaatgcatggatgtcatttactaggtgaactttaaatagatattgataaattgttcttggtaagatgacctgcaattttctaaatattggcaaagaaaacatttctatatccaatattctagaggtggttgtaaaattccaaaaattgtcaaagtattaggctggtaaacagtagattaaaacaaaaggtcagataaaaagctactttaattctcaatccttatgttaagctgtaagctgaaggactattaaaacaatacacaactctgttcagtttttagtaaaacttattttcttaggcatgctgacttacttaaaagaaacactatttcattcaatatggctttaaataaaggttgtcgtcgattttctaaaccccagacaacttttaaaatcttatgcagaattggaatcattcttggattttacattaaaatgtcattgactgttctgttgttatatggggataaagaacagcacagagattttccactgagcatactcacgggagaagaaaacatttttcagattacttgtaggcttttaagtcattttccttgatttatactgagaatccagattgtcttagtaagtagataggtaatacttcaaagctttatatttttgttttcttgctaagatgtacttaaatccatatctcataaaagaagatccatgcagaaagaattgtgactttgtcaaagatctcttttttcccacttaccgttaggttcatactatattttactgctctgtatttaatacgattaaatggaatgaaaaaaaaaaaacccacaaggtagacatttgaaaatgaatgtaattcatgagttgctgctcagggtagctcacttccaacttaacttgaaatccatcattcagtataggtgatagtctgcttcgtaaataaaaccatgatttggagacattttttcttcaagatacgacaaattgctatgccctttaaaggttacctgatctttgtagaaggttaccagaaggtcctgaagaaaacccttttttttttcccacctcaaaggggaaggcacaggagccattctttagtgttgggacattttagtttaacaagacaattccatggatagtctgtagaatcagaatatcaatggccatgtgtattagtctattttcacactgtgataactactcaagactgggtaatttataaagacaagaggtttaattgactcacaattctgcatggctgggaaggcctcaggaaattcagaatcatagtggaaggtgaaggggaagaaaggcacgtctcacatggccgcaggagagagagtgaagaaagtcacacagttttaaaccgtcagagctcgtgagaactcactcactatcatgagaacagcctgagggaactgcctccatgatctgatcacctctcaccaggtcccttccttgacacctggggtttacaactcaacgtgaaatttgggtggagacacagagccaaaccacatcaccatgtcatatactatctgaagaaacctgcctattctcaaatgtcagcagagatcttctcagagtttcttaaaaaatcaaagaaaccttattttttccctcatattttaaattggatttgtattggggagctacagtggtcaaatgccattaattttctcctcttacctgaggccctctaaaccctctggtactaagcagtatttttaatcagtatcttactgaataccttgctttagatgcacatttcagttaactcacttattaacacctattatttcttgaaacgttgagccttcaataaggaggtgtgtccttggcaggatacagtgaggagaaaattattaggtttatgaagccggaactataatcagttgctgtgtaagtgtctcacgtttttcagtacagtttttcccctggatttttcaaggtacttccttgaaaatgattcccactgcacatctcttagaataaaataaaccttcaagataattttttaagaaaactgagcccagtaactgttctttcctaaaggggaggggcaactagtgtgaaaatactagtaacaatttctttttcctgaatgcccatttctataaatgttacaagcacatctatagaaacacattctccctttctcttttcactctcattcttaaaacaatcctaaaacagacattataatccacgttgtactgggaaaatggagtgctggcaagggcaaacagctaggaagtgaaggaggcgggatctgggccccagctgctaccactccagcttctccctgttctgctctgcagactgcatctcatgccacatctgtgccatgcagtttggatgtaaatattaggaaaaaaaaaaaaattaggcattgtccttgctcttaaagagcttagaacctaacaatcaaatgtccttaagaatatccttttctgaaaggaaagcattcaaacaactataaaaaatgtgaaaaagccaatgaacttcaaaatcagttggcaaaatagttcagttgcttccaccttgagcctgtattcccaatctctcttctcttctcggttcttgctgccattgcctgggtgaggtctctggtgcttattctctctgccagagtaacagtgtcaactgtccttgtttctagtatcttccctctccatcctttccccatggcctccaaaattatcattgcaacacacagacaggatcatgtccctctcctcttcagaaacatgttccttaacttattattaaacttcctttacaatcttgtttgaatgtatctttccaggtttatttcagtagtgcccagactccatcatcataccaagagagcaagcaagaagcactcaacattactaagtgccttctgactctcagggtgaggagaaaatggtgtgggtgggatctgaggaggtaaggtggagcctggagacaccctgagattgttcacatcccctgaccttccctgtttaccccaatcagtgaaccctgcaaagaagatgcaattattgtctcgcaaaaagaattatattaaatttgaaaagcagtaacatattaggagttttctctgggcaaagaaggccttttgatattagtctccattagcaaaatttaagacaatttattgttcggttgacaaaaaggctgaactaaaagtgcttaagcatttcttcctgcttagtccaatagatgctggtattattttaattgtgttacacaagaatagaaagtctacaaattaggaaaaatcgtatttcatccacaagaaagaactattgagaaagtagaatggtgatcttttaattatactttgaatataagcatttggaggctgttctctgtgttgagggttaggtattaattttgatgcattatcctaggggttgtcaaactttttctgtaaagggccagatagtaatacttggctttttggccagtggtcttcactgtaactacttgtctctgctgttacagtacaaccatagaaaatgtattttaaaaaggagtgtggatttcttccagtaaagtgtgaagcttattattttgtgcttgttatgttttattatttataaaaacagaaagccggccagatttggcccatgagctataggttgctgattccttctttaaccattaagtatgtctgtttttatcagtttcctcagtttttattctttggactaatttgaggatgctattcacgttctttcctttcttttttctttctttctttttttttttttttttaaatatgtgcattgaagccacttcagtgtggtaattcctagtgggtttggcttctgtgcagaaggtaaagttgtcaatgtttgtgtccacgtgtaagtgtgcacagggtgtgtagtcacagaggaacctctaaagaagtattgcagggaagcctctgtataattgcagcaacagacttttatgagaccactgctcagagcacattgcttcttcaaggcccagccacagtcacttctgcatatgtcacagccccacaggtccatctcagcacatgatgtcacatttgatctaatggggcaccaaaagaggccaggtttctatggtgagagttgagtctgtcatcatctgagactggagccagctgtactatcaaaatggcttgatgcaccaacagaaatcttagctcccttgccttgaattgcagtcaaagcaagatgataccttttgtgaatgttaaaatgcaccaaacaattaaggagatggttttattcaggctcttgcaatagagagaagatgtattaatgaggaaatccttaaagaagagggagaaattctgggattttatacagcaggtaaacaaaggagtcagaaggaaggttggaagtaatcttatattggaatatgagagggcagagtgccttccttctctcgactccctggaaacctttgtgatatgtctctggagcagtcagcattagatttgcttccactagcaacttagccttacttatctttgtatcctcattgccagatacagtcattgcctgacgttagcaaggcacttcataaatgtttctttgactttctgtttacgtgagaggagtggatggtgatgtctgatctttgactcctgagatttggaggaggaaatggagctcttacagtgtgtagactccttccctctgtcctacttagtcatcatgagaccctggggaggtgtggttggtgaggagaagacataagtcagtgcacaatgactatttgttgaatgtctctatttacaaaggcagatgtatatgtttagaaactcgttgtggacttttagcaaaacagtttggaatttatgtgtatattaggagttattagtattttcttctagttgctaacatgttgggcccatcgaaaaaacttattttttgacatcaagtatttataagtacaatgaaatttcaaatatgaaagttataaaatctcatgtgatttattatcttagaattaattttgaaggagatccttgttactgtctgaatttaggaaataccccttactaattaatgagccaatttttatttataactctagacaatagattataattcagactaggcccttattataggtatgtacacttcaagatgtgatggaatttctctctactatgaaaggtgagcctatgaaattcaaatatattttcactagctatgactacagtggcttcagcacttttaagacaaatgattatcttgaccatagaattgtagtcagaatcttagatgtgaaatttggtgtttgttttgtttctgctactctcattagctagtttatatttatatacacccactttgagaagtaattggaaactcatggttctcaaaaatgttctgtgaaaaatattttaattttactttctgaaacagcttatcagggtttctgttcatttcacaagaattactgaaaacacaggtggcatcatttatgtaataattctgtagatttttctgtcttaagcttaataatggtcctgtggatattcagatttcaagagtagtttttttttgggggggtggtgtagtatgttttcaaattataagttctttattcttacatggaatcatggctgtagctgcataaccatgcaggtgacatttgtggcagcaaagaggaataatataatttaaagttttattactgttaaagagcaaagtttgaagagcaatcatgtgacttttctgattttatctgttagcagtttttttgaaaactaataaaagagcattattctttttttgaatatttacgatgtgtcatgtactgtgcgtggcacttcacatggtattattatatcttttaatgctacaacaatccagtgtgaaatcgttattattatcatcattattatattatactcttttagagatgagaaaaacctcaagtaaactgcatagatctccttggctactaagtggctaaattcagaattccaacccatctgcctttatattttgctggacaacagcaaaacgtctgctttcgtggatatacatgctgatgaaggaacacagacaataaaggaatatataacacaccaagaagcaatgagtgtgatggggaaagatcaagtgcagtggaggagggagagtgttggaagcctggggttagaaaggtgagtcatggcccttttgatgaggtgccctctgagactggaggaagtggtagtacatttccagaaaggaaacccagacatacatttgcctttagttttattcaaaaggaaaatttgtgctgagaagctctacctgccaagtgaattagtaagctactcaggtaaactggccagagacctaattattaacaggatcttgatgtcagaggcttgttctgataaggaattccattaggttcagcagtattttacaacaaaactatgttgaacaacttttagaaaggtgctttttcaacatcagaatcacctctgttattaagaaaaaagaaaggccacgaatataaattgcataggtctccttggctactaagtggccaattcagaattcaaacccatgttgaattccttggaattttttttttttcttcttaaatgggccagtgaaggttattgttctgatagtcttaagtactcagataagaataaattatagttattaactagtcatatataatgtgagaaatagaccctttaaaaattctttcacatacttcattacttgtaaaattataccagcaggaatagagacgtacctacaagatgtatatttaatttagtcttggagtttttacatattacttaattcagcggtcttagaaaattatttttcccaaagtgtagtcatttgcataaaacatttgttttctataataatctcaaataaaaattggctggatctaatatagcattacgatagaaatcttattttgaatatgaaggtgataattcaagaatatcttttggctggcgtggtggctcacgcctgtaatcccagtacttcggcaggctgaggtggatggatcactgagcttgggagtttaagaccagcctgaccaacataaagaaaccccgtcttgactaaaaatacaaaaaaatcagctgggcatggtggcatatgcctgtaatcccagctgcttgggaggctgaggcaggagaattgcttgaacctgggaggtggaggttgcagtgagccgagatcatgccatggcactccagcctgggcaacaagagtaaaactctgtctcaaaaaaaagaaaaaaaaatgaatatcttttataatctggactagtccaacacttaattttgaagtattcaagtggaatctttttatggaattcttaggtgaattttctctcaatttggggtctcagtgtaccaatctgctatgagttggaaaaccttcctcttttacaaaagggatagtttccttctgaggtaaatcagtggaagctagagatctccacaaatgttagagttttgtactttgtacttaattgacttaattagcatacagttgtacattagttgggtgagttttgtttacctctgggccagaaatacatattcatccattatttgacacatgtttctggggcttttactacttgcgcattattatactaaaagtaatgtggtgtacaaagtttttataaacaaaggcttttgtctccaggaacttttataatgtactagataagatcaggtactcaaataaggaagcaagaagttgatgctatataatgtttgagtatagatatgttccaaatacaaataacatatacatatatatgaaggcatttcctccttatttctcttgaaattatgtggcttcgttttagtatgagtctcatcagttacacaattgggcaagtgattcaacttttccccccaagtatttagtctcttcctctgtaaaatcaggtgctgaaggttgttccacatcctggtgagaagtgaatgggatgagggaaatacagtgcctgcgtagggccgcacacgtaagagctcattaaaagtggatttctcatcttttgtacattagtgaaataagctccaaaggaaattgtaatgattttcattatacaaaatatatatagtgtctgagtggcttaccattgtagatttagatagtggttcttgtgtcatatagtgggctcagcttttcagaaagacagatttgagttgtccaaggctatgtgccgttgggtgttacttaatatctagaaactaattgcctgggtttaaattgcagctgtgcaactttaggcaacttagttgacctctctgtgcttgtttcctcttctgtagcatggagatagttgtaatacctgtctcagataattatattttaaagattggatgatttaatatgtaaggctgtgagaacagtgcctggcacattataagctctgtaaaagtattcattcaataatatttttagacatgaaaagagggtggtaacaagatcccctgctcttaagagcataatccatccctttctcactgtattgtaaatttttgacctcacttagcctttgtagaaaatagtttatattactcaggttttttttttttaaatcattttgtaagaccacttgatgatttgactataccctttttgcacttggttttggaagccatcctctgcatgtatcttttgactatagaaactaaaaacatttttactgtagctgctactgcatattcctttactgtctccttatgtctgaagatcatataaatgtctttagcaggatttttcttaccaactcacttgaacttagaaactgaaagcacagagttagaagtggcatctcctgtcaaacattccctagcgaaaatttcttacagcattgtcattcagtcccggaggcctgctatctctgagtgctggagtgtgatttcctgtgtcactttcctttctgggaccataaaattggattccagacatttgttgggaagtttgcgatatgctgttttgaacattactgaaccaatataataacccactacttgtgttttggaagcagtgttatctgtgacagttattgctttgctgatttacatttggaagaatgttgaaaaagaaaaaggcagagcagtaaaaggtagaagcatgtatgtcctggtgatctttagcaggtaagaccagactgatgatattaagctagaatttaggttcatcatggtcacatccatgcgatagaaaaatatcacatcacatctttaagcaacacacattctgaccttctgtaataaattgtatatctcccttgatctttctggaaacacttccagtttctacacctggagtgaagacgcttgccaaatgacaagaataaattagagaattaatccagtgccaaagataatttttgagaaaagagtatctgtttccaaatggcaaaagaacatcattaatatcttctctagcattcaaagacaggagacagatgctactaataaaatataataaactcctcatggttgtttccaataaaacacaaatgattttgtagttctataattggaactgtcaatctaatttagtaggtttctgttgataaatttgatttcaaaaagttgagatgagaaactaattcactattatgtacaatatttcttgctaagtataaggaatattagcaaaaactgtagtaaaaattaggaagttgaactattaatacctcttggcttattgagatgcagcagatctttatgtgactgtcagtttagtggaaagagtgacaggaatcccaggttgtaactcctgctctgcctatcactaggtggctattgcagggctggcttcatggacacgcgacctctgcagctgcccagagccctgcactcagaagggtcctgcccttggtttaatcctcttctgtcactgtcttcagagttgtaatttttgagcacgggactcacattttcattttgccctcagccctacaaattaggcaaccacaactggctgttcacagcttacttctctgaatttcagagaaggcaaccaaaagattctggagctaggcatcgggtatacatggacataaagatgggaacagtagacgccgaggactactagagggaggagacggggagggaggaaggaaagggttgaaaaacgacctattgggtcctgtgctcactatttgggtgacaggatcatttatgcatgtttatgatgttaaggatcaaaccttagcatcacacaatatatctgtgtaacaaacctgcacatgtatcccctgaatctaaaataaaacttgaaggaaaagattcttgatagatctaagagtatgaaattctgtgagtcccaacaaagggaaggacccaagaaagtttattagaaactgaaagctcctgatccaccctcacttgttctcagtcaggaggaattttgccccctagtgggcatttagcaatgtctggaggcatttttgattgtcacagctcagggaatgtgatgttgacatctagtgggtagtaggatgtttaatgctacaaatacacagaacagcccctgcaacatagaactttttggcccaaaaagtcaacactcaacacaggtgatgttgataaaccctgcctaccgttattatttgtgtctccaactcttggtaccgggcgtgggaggttactcaaaagttagttgagcctctggctgtagcctggatcgtaggttgttgtattttttaccacatgaagactgaagaacgaagctggtgagtaggaagtgtaacttaacatttgcacgagatacactacacagatgctcttcttagggcctctacatctcacacttaccaaaccaactggtgggccccagactcttaaaacctctaaaacacaacacactcacagctggcagatgactttccaggacgccctggcacttgtgatgcggtctgttgggctgtttaccaagtcatttaggtttgtttctaaatctgtttatgccattgtgctggttgctgtaattaggcagtagaatcaactattacagaaatttaaagaaagaaaaatataaaaaaaggagagcaatttcagtgaaaacctaagttgaatgttttggaaagattcaataaagatgtcattaaagaaaactgctctcaaagtgtgggcaagatggttttaaaaggtttgtgaaaaaatcattaaaattagatggattctatattgaatttgcttaactgtcttaagttttcagtattatttatggagattgtagacaatacatttttttctgtggtttttgcaagaaaaacaatgctttagtcagctgatccaggctcagaaaaaaaaagccttacctacatcacaagatggaagaatgaatggcatttatatattttagggtgataaaattatttataaatgtaacctcagctgactttccctaataatcaatatttcagacaacagggcgtctattacctttattttccagtgggaaaaatatcaaatattctacttttctcacttgcagatccaaacaactctcagctcagtgatgtctctgaataatgttccttatttaacactaccttatatgttaagaagatattcatttgatttctgactccacaaacaccatcataagatctgtctcttgccagattcaatactgaaatgtttaagaactgtgcttccttttcagtgcatatgttttcttgagttgccatgtgcctgtatagattagcggcatctgggatttttaccacgtcacattcttttagaattgaagaagtataaatattaccagaattgtagtcaaataatttcaagttttttatagaaaatatgacaaataacctaatgtataaggaaacaaaagtttctgcaattccatcactgtttctaatagaaaattatgaatgagacattaattgtcagtctgcctcttcttcagatggcttttgacttagtattattttgttttaggacccatgtctctacattggactttagagcagagttctggcctcttatcttgagcttgttaaaagaaactgtcgccaggcatgatggctcatgcctgtaatcctagcacttttggggaggccaaagctcgaggattgcttgagctcaggagttcaagaccagcctgggcaacatagtgagaccttgtctctgtaaaagttttttaaaaaattggctgggtgtggtggcacatgcctgaagccccagatactcgggtggctgaagtgggacaattgcttgagcccagggagtcaaggctgtagtgagccatgaccattgccactgtactccagcctaggtgacagaataagacccagtctcaaaaaacaaaaacaaacaaacaaaaaaaccttaatgttctatttcctattaatagtcacaatattatagatattatctaacagtttaaagccataaacattctatttggctagtaaaatgttttcatcatttatgatcaaagatttcaggcatttttcttctttaattagtttaagttaacaataaataaattcagcctccctttggagggttagaacaggacagataaagctaaattcctctttgcccatcacatcgatcccacgcattttatacctctctgctccactgctggccataacagatttggggaatattcttccagacacacacacacaaacacacctagagaatttttatggtaatagtatcataatgcatgtattattaagttacttgtttgctttctttcaagttgagttgatttgagtcagatcttatataaatctagtccatccctttaaacttctctgtgatattccagatatggaatgtcacattctgtttatgtgttcttttattaataggcattacatttgggggtatcataaacagtgctgtaatgaacatccttgtatatgttttcttgagcacatgtatgtgtgtttctctagggtagatatctagaagtagaattgtgcacaaccatttatctcatggtgttatagtgttattttagttcatttgtttccatggtaatttctttctaagcttcaaagtatattggctggaagtcatcgaatcacaaccttttagaaatcaaagctcaggtatcatcttacaatatgaaggattagtttaattgtttctccatattctttttttttttttttggagtgacgcagtctcgctctgtcgcccaggctggagtgtagtggtgaaacctctgctcacagcgagctccgcctcctgggttcaagccattctcccacctcagcctctcgagtagctgggactacaggtgcccaccaccatgtctggctaatgttgtttttgtattttcagtagagacggggtttcatcatgttagccaggatggtctcgatctgttgacttcatgatccgcctgccttggccttccaaagtgctgggattacaggcatgagccactgtgcccagccaattgtttctccatactcttaacatttggtatcttgaccctggagcttcctgtcatcaccaccaccctgctgctttttatgccttagtaaaatctttttggcttctctgttctacttttattaacagaatttcagataagagaatgttgttataaggaatcattttagcaggtgtgttactatatttagtctaaaattttaaaaaatctggataggttttttaaaaaaaatccttaaatgttttgagatgctgattagttcagaattatacatatgttggtttaaactagttgaatcttttgatgctgtttaattacctcagactctacctcagaagtagaaagtgcttatattttaaatctgggttttcccgtaaaacccattgtatattataaaagtaatatagataaggcgtttttccatgtatggaatctttaaggctggtaaacgatatcttccttctttgaatagtgtttcttcctttgaataattatgctaccactcatatttaatggcttctatgtgtgaggtattgtgccatatttttttcttttaattcttacagcaagccaaataactaaaatgtgaactattatcattttatagttgtaaaaattgatagagaagttaacaatcttgcccaagtttaccctgttaggaaatagaagaactaagaattcaaaacaaagcttatcttattagaacagtatacactcttcaatgtactatataaggatacccttttccatcatcatttaaaaactatgtgagtctagttctgggattatgcttaattttaaaatagtaatgacctttttttaaaaaaaagttttaaagttgttttcagcagcaattgtaaataaaatagtttggtggacagtcaattaattttgtgtggcttttttttggatagcaaaaaagaacttatgaagttttagaatatttatactattcttgaactatttactgattcttctttcatatacttactagaccgtgtgcttaaaattttgaatctttaaaagtaatgcaagttttttatagaaaatatgacaaataacctaatgtataaggaaacaaaagtttctgcaattccatcactgtttctaatagaaaattatgaatgagttcccttctcgcagcatctatgtgcccacttcacattgggcacttctctcagccacagagcaaaggtgggaggggctcattagtttcaagaaattcttatactgggtcaactttagtaagaaagaaagaaacgaaagttgaacacacatgactgttagctaattaaaagatgtggctcatcttctttataaataaataaactgattagtgacccattgctggaaactggaagaatcagaagtaagtgtgcatctgctagcattacaaatactcaaatgggaatttctttatattattaatgattaaatttatgaaggaattaaaaatatgatcttggcagcagagagtatgaatttgttatgtgtatttgagatctgtctagccgacactgtagacatgggtttattcttgtaaaccactttttctccagagagacttgagtgaacaggtgggattgcttccattgataggaggataagggaagtgagtacaatgtttatatctaactgtacttgcttcctgcacttctgatatggagaccttcacctaaatctttactactgttattgtcttaatacctctttttctttgcttagactattagaaagaaattttacctgactcttagaatttattcattattttgttactatattttcattttaacataattttcttactaataagcttacatttaatgaacataaactatgtgccagttatggtggcaaatgctttacatgctttgttttgtttaatccttaccacatctctttgatagagattcatattattgactgttttctggaggagaagtggaggctaaggaaagaaaaataaaattaaccaaaatgttacagctgatagaagacagaggcaaatctcttgcccagatatacctgagatacaaagtcaagtattcttgccactctgttacagcttatacatttcaaaatttctttttggaaaaaaataatattgtattcttatgttttcccagtgagctcctgtaaacatttaggtttcattttaatcctgcgttattaatttcaattttgtattttgcctaagtattagctgactgtatggggttattaatttatactcatatggtgggaagttgagtatgtttagacttaaaacattcatgtactgtttttctttttcaaattttaaccctgtttgattgaaattattaaatcatctagaaatgtgattctcaaccttggctgatcattggaagaagcaaaaactgtgaaatcagattctctgaggtagggccttacgttggaagcttcttaattatacacatatgcagccaaggttgagaaccacggacttaaaatagcctttggtatccacgggggcttgattccaggatacccctcagataccaaaatctgtgattgctcaagtctctgatataaaatcgtatagccttttggtggcacactgccacttagtggattttagagcagtggttcctaattagcatgcatctgaatcagtggcaagagaccctattaaaacatagattactgggcttcatgcacagaaccctgaatcagtaggtctaacgggaggcctaagaatttgcatttctagcaagtttcaggtgatgccagtgctgcttttttggactgccctttgagaaccacttcagatttaggtatcactctttgagaaccactgatttaggatcttactttctgagttggtctcttaaacttccttttagtttaagtgatcaccatactccactacccaccagatacacacccacataccctttgtaagctatcattaagcattactaggagcctccagatgcctgcactaatactaaagggtagttgtacctctggatgagggatttgttgtggctcacctggggacacttcaaatgaacttcattcttcccttcctctattctgtgaagtataaagtacacagattagtttagaggtctcttcatactgtagctacaggcccctttttctttaactcttcaataattttgaaaaatctcaaaagtttaatgttttcacccctaatttctcttgctaatttgtttctagcaaaaatgtgtctttgtcagcagtgctggtaagtgattacagataaggtagggttaggcagtaccgatgaccctccaacaacatgggtttgaacttacaggtggattttcttcccccgccacctctgacacagcaagaccaacccctcctctgcctcctcttcctcatcctactcagtgtgaagacaataaggataaagacctgtacgataatccctcttctactcattgaatagaaaatatatttttctctcttatgattttcttaaaaactttttcttttttctagcttactttattgtaagaatacagtatatagtacatatgacttaaaaatatatattaatcaactgtttgtgttattgataaggctcccagttaacagtgggctattcgtagttaagcttttggggagccaaaagtgtttaaggtgccatcttgaaaaccagaggctagtaacatgatcttcgacattttagcctctagaactgtgaaaaaaaaaaaaaaatctgtcctttactcattgcccagtctgtgctacagtcattttttggtatccatgggggcttgattccaggatacgcctcagataccaaaatctgtgattgctcaagtctctgatataaaatggtacagtggccgggtatggtggctcatgcctgtaacaccagcactttgggaggctgaggtgggtggatcacctgaggtcaggagtttgagaccagcctgtctaacatggtgaaatcctgtctctactaaaaatacaaaattatccaggcatggtggcacattcctgtaatcgcagctacttgggaggttgaggcaggggaattgcttgaagccaggacatggaggttgcagtgagctgagattgcaccattgcactccagcctgggcaacaagagtgaaactccatctcaaataaaataaaataaaattgtatagtatttgcatataacctatgtacatcttcccatatacttgaaataatctctggattacttataaaaccgaatacagtgtaaatgttatgcaaatagttgttatactatctttttttaaatttgtattttgtatttttattttttgtgttttttgggaggaattttttgttttgttttgtttttgagatggagttttgctctcattgcccaggctggagtgcaatggcgcactctcggctcactgcaacctctgcctcctgggttctagcgattctccttcctcagcctcccaagtagctgagattaccggcgcccgtcaccacgcccagctaatttaaactttctgtgcttcggtgtcctcatctacagaaagggaataatactcccattttgtagaatttttgtgtgtggtattatatgagagaatgagaaaaaatgtctggtactttgtaataaattaaaaattcaatacatttctaaatgtattgaaaaaaaaaacccacgatgatacctcttgagtgtttcttctccttggagatgacttgcttttttatagaacaggggttaaggcatattaggggcctggcatgtcattagtcccttcagtaatacacgttgatagggaaccaacagatttagctaccccacgatatagcatatccaaggcttagatttatagattcaagaacatttaaaaatatttgtctatggggcacctctgacggttgagttttgttattgccatcagcgcccactcactttttggttaagtgttgtttttgtctctcctcttccttggtccttggagataatcgttataattttaataagctagcactgcattaaaaatgatatgcattgaaatttaagattctagttgttaaatagggtaattcatatactattctttttgaagtggaagttgaggctagcataattcataaactccttctcaataggtattgctttttaaaaaattaactttattcctgattatataactgttttaatttacatagttgtgttgggtgaactgtataaatgtccatatttacaggagtggttcccaaacatctctccctgtcccagtccattatgatggcattattattcaccaggggagagggtggttgtggagcacagagcagggcactgagccagtgaccaatacgcctagcgtgagggctcctttccagtgtacaaatcatggatgtaaattattaacccctagtttgctttttttggctaacaaaatatcattatgtcactggctgtcaaggagagtgaaaagcagctttatgaagttccttctcccattttttttttttaggggaatatacactatactcagccataccctagaaatcagagccccatacatgctaggcatttttgtaaccttagcctatgccatcatccatattaatgccttttaaaacttcctctgtgtctttaccttcctcagtggactttgaacccttcacggggatggattgtgtcatattattctcagagtctcaaggacctaagagagttcctagctcatgacatgtgctgagtagttttgctgcatgaaagaatttgaattgaagatcatttgttcctttttaaaagacttttagaggaaattccatgacctcattcattcatttcatgtttaatagtgcatattgcttacagattttatttattttgttgctttctgagcccatctttcagtctgttttcagttgtgataggcaattcattcattattctttgtatttgggatcaaggcattagagagatgtgtaatacagactttggagtcaaacagagctgggtgtgaattgggactttgccactttttaaatgttgttgttggatacattacttaacttcactattgtctcttcatttgtaaaatgagtatgaaaaagtacccactataggataattatgaggactgagtgaggcagtgcacacaaagttcttaggctggcgcataataagtgcccaatacaacaattttttattgtagttgacgtttagatagttggttttcaataagcatgtttttcttaaacctgattatttaaagtcatccaatgattcatttgttttccttaatttcagttgttagttggagaaatgtttacagcctagtgaaaatgtgtgcggtagaccagtaagatcacctacttaataaaatcatctatttgctaggttaaattttgctctgtattattaattatggaaattgattttcttgctttgaaactttattatgtttacccagttatttatcctagtgaaataaattatcaacgaaaatgctgcttctaaaattttcattgggatgattgataacttagaaatgtcatatttattgaagaaatagaattatttttattcagaacaaattcactttgtgattatgcacatttaattttatttatagacttttacatcccagtggtgctaagtgaagtgaattttgcaagatcatagtttcagtgccttgaatgtcattaagtcccaagaataaagagtgctgacttagatgtcagaagacttgcattctcattctgattccctcagttcttagtctgtgaccttgggcaagtcatttaactaccaagtttcattttctttatcttttcctgccttgtctacctcacagagtcattgggagagtgaaatgaaaaaatatttaagaatggtgaagactgtggaaattaaagatattatttttggtgtaaggcaatttttagaaaagataacagcatgtaggctaagacagtgaaaatacatccattcacctgactttttattccaaatcaatatcagaaatattcaagaagtgtctttaatgtcttttttatagctcactttgaaagaaaatttacaaattacagggtggcttgttatttgtgttcccctctccagtatgtgctgccagtttggattttggcaatgcagttttttgttgtcgttaaggcccactttgagtgaatgctaacatcagcagatagagttgaggaaactttctgaaaacagctaaacataccagtgcttatccattgagtgtgtgagtcaggagactcctgtttgcttggtcatgttgatgtttacatatgctaaaataatttctcctgagtgtccatgccctctcttatcatttctcctcttggtgaggacctggagcttttggacattggggaatgcattgcagcctgtgtgtggcactcattggccggccagctagccttttttagtgtttactgttccactgggattaagtagtgagtggggcttcatgtaataaattgtgtcccctacaaattcatatgttgaagtcctaacccccagttccttataatgtgactacatttggagatagagcctttagagatgattaaggttaaatgaggtcatatgagtaaacgctaatcactataactgcgattcttataagaagaggaagaggcaccagggatttgcacacacagaggaaagaacatgtcgggatactgcgggaaggtggctatctgcaagccaaggagagagaggcctccagaaaaaccaaacctgccaatgccatgatcttggactttgagcctctagaactgtgagaaagcaaatttctgtttaagccacccagtctgtggtactttgctatagcagccctggcaaaccattacatggagatcccaggtgcttggcactaccaggtgtatgtgtcggtcattaggactgtgaaaagcaccttaaaagacctgatgaccttaatgtaaattgagtttcagtttaaatttagtagagggtagaggttcacagattatatagcctgttacagcctgtaagtttttgggttttgttgctgttgttgttgttttttaatgtagagctaatggtttattagtccattttcatgctgctgataaagacatacctgagattgggcaatctacaaaagaaagatgtttaatagacttacagtaccacatagctggggaagcctcccaatcatggcagaaggcaaggagggtaagtcatggcttacatggatggcagcaggcaaagagagcttgtgcaggggagctcccatttttaaaaccgtcagatctcatgagacttatttatcgggagaaacaggccccaatatttcagtgtaggttctttctattttccataagtgccagctggctgagaaataaagagaaagagtacaaagagaggaattttacagctgggcctccaggggtgacatcacatattggtaggaccgtgatgcccacctgagccttaaagccagcaagttttattaaggatttcaaaaggggagggtgtacaagaacagggattagttcacaaagatcacatgcttcaaagggcaaaaaggagaacaaagatcacatgcttctgaggaaacagcaaagggcaaaaccagaaactcctgataagggtccaaaaaagatcacaagacaaagggcaaatgcaaagatcacaaggcaaagggcaaaagcagaattactgataatggtctatgttcagcggtgcacgtattgtcttgataaacaaacaacagaaaacagggtttgagagcagagaactggtctgacctcaaatttaccagggcaggtttttttcccaccctaattagcctgagggtattgcaggagaccagggcatatttcagtccttatctcaactgcataagacagacactcccagagcggctgtttgtagacctccccccatgaatgcattccttctccagggtattaattattaatattccttgctaagaaaagaatttagcgatatcttccatacttgcacgtccatttataggctctctgcaagaagaaaaatatggctctttttgcctgaccccgcgggcagtcagaccttatggttgtcttcccttgttccctaaaatcgctgttattctgttctttttcaaggtgcactgatttcatattgttcaaacacacatgttttacaatcaatttgtacagttaacacaattatcatagtggccctgaggtgacgtacatcctcagcttatgaagatgacaggattaagagattaaagtaagacaggcctaagaaattatgaaagtattatttgggaactggtaagtgtccatgaaatcttcacaatttatgttcctctgctgcggctccagctggtccctccattcggggtccctaacttcctgcaacacttatttactctcaggagaacagcatgggaaagacctgcccacatgattcagtgctctctcaccaggtctctcctacaacatgtgggaattcaagatgagatttgggtggggacacagccaagccatatcattctgcccctggcccctccaaaatctcatatcctcacatttcacaaccaatcatgctttcccaacagtcctccaaagtcttaactcatctcagcattaactcaaaagtctacagtccaaagtctcatcctagacaaaacaagttccttctgcctatgagcctgtaaaatcaaaagcaagttagttacttcctagatacaatgggtgtacaggcattgggtaaatacagccattccaaacgggagaaattggccaaaacaaaggggctacaggtctcacacaagtctgaaatgcagtgagacagccaaatatttaaagctccaaaatgatctcctttgactccatgtctcacatccaggtcatgctgatgcaaaaggtgggttcccacagccttgggcagctccacccttgtgacagactgttttattcctcacccccttcccacccttttccctcaagtccccaaagtccattgtttcattcttatgcctttgcatcctcataatttagctcccacttatgtgtgacagcatacgatgtttggttttccattcctgaatatttatttcacatagaataatagtttccagtctcctgcaggttgctgtgaatgccactaatttattcctttttatggctgagtagtattccattgtatacatatatatatacataccacaatttctttatccactcgctgattgatgggtgttagggttggttccacatttttgcagttgctaattgtgctgctgtaaatgtgcgtgtgcaagtatcttttttgtataataacttcttttcttctgggtatatatccagtagcgggattgttggatcaaatgatagttttacttttagttctttaaggaatctccacacggctttccatagtggttgtactagattacattccgaccagcagtggtgaagtgttccctgttcactgcatccccatcaacatctactattttttaattttttgattatggcaattcttttttttcgagatggagtctcgctctgtcacccaggctggagtgcagtggtgcgatctcggctcaccgcaaactccgcctcccaggttctcgccattctcctgactcagcctcccaagtaactgggactacaagcacccgccaccatgcccggataattttttgtattttttagtagagatggggtttcaccatgttagccaggatggtctcgatctcttgacctcgtgatctgcctgcctcggcctcccaaagtgctgagattacaggcgtgagccattatgcctggcctgattatggcaattcttgcaggagtaaggtggtatcacactatggttttgatttgcatttccctcatcattagtaatgttgagcatttttttcatatgtgtgttggccatttgtagatcttcttttgagaattgtcttaggtttaagtccttaatccatcttgagttgatttttgtataaggtgagagatgaggatccagtttcattctcttacacatggctagccaattatttcaggaccatttgttgaaaatggtgtcctttccccactttatgtttttgtttgctttgttgaaggtcagttggttgtaagtatttgggtttatttctgggttctctattctgttccattggtctatgtgcttatttttatactggtataatgctgttttggtgactgtggtcttctagtatagtttgagatcaggtagtgtgatgcctccagatttattctttttgcttagtcttgctttggctctgtgggctcttttttggttccatatgaattttagaattgttttttctaactctgtgaagaatgatggtggtattttgattggaattgcattgaatttgtaaattgcttttggcagtatggtcattatcacaatattgattctacccatccatgagcatgggatgtgtttccatttgtttgtgttttctatgatttctttcagcagtgttttatagttttccatgtagaggtttttcaccttcttggttaggtatattcctaagtattttaatttttttgcagctattgtaaaaggccaaaccccgatttttgacttctgtgcactggcaggctcaacacaatgtagaaggtgccaaggcttgaagattgcaccctctgaagccacggcccgaactctatgttggccccttccagccatggctgaagcagctggaatacagggcaccaagtggctaggctacacactgcatggggcggggggcccagcccacaaaaccactttttccttctaggcctgttggcctgtgatgagaggggctgctgtgaagacctctgacatgctctggagacattttccccattgtcttggggattaacatttggcttctcgttacttatgcaaatttctgcagctggcttggatttctcctcagaaaatgggattttcttttctaccacattgtcaggctgcaaattttccaaacttttatgctgtgcttccctgataaaactgaatgtctttaacagcacccaagtcacctcttgaatgctttgctgcttagaaatttcttccactagataccacaaatcatctctctcaagtttaaagttccacaaatctctagggcaggggcaaaatgctgccagtctctttgctaaaacataacaagagtcacctttactccattccgcaataagttcttcatctccatttgagaccacttcaacctgggtttcattgtctatattactatcagcattgtgggcaaagccattcaacaagtctctagagagttccaactggtatgttttcagcagcgccccactccaatgtactgtatttgttttcatgcttctgataaagacatacctgagactgggcaatttacaaaagaaagaggtttagtggacttacagttccatgtagctggggaagccgcacaatcatagcagaaggcagggaggagcaagtcatgtttttcacggatggtagcaggcaaagagcggcagcttgtgcagggaaactcccgtttttaaaactatcagatcttgtgagacttactcactatcacgagaacagcatggaaaatacctgccccccatgattcaatgacctctcaccaggtccctcccacaacacatgggaattcaagatgagatttgggtggggacacagccaaaccatatcagatgtcaaagctacatttggtatggaaaagacaaaaacaacaatatttgagatagtgcatttgtatgcctacttttatatctttaatagtttgatatgcttttttactcttaaaaatctggaggaattaatacatgtagctcaaaatctctttaagtgacatgcacatgttctcatatgggagctaaaggagtggacttcatggaggtagagagtagaatggtggttactggaggatgggaagggtagcggggaggggaaatgagaagaggtggaaggaataaagtgtagtgtttgatagcacagtagggaggttatagttaatggtaatttattttatattttgaaatagctagaagaaaagatttagaatgtacccaacacaaacaaatgataaatgtttaaggtgatggatatcctaatcaccctgatttggtcactacacattgtatgcatgtatcagaatactacacgtacccataaatatataccattattatgtatcaatagaaatctttttaaaaaagagacctgcacaacgtgtattatttttatagttttgtttgttttaaagcatcatgctttctcatactggttaactcagaccaagtattgttttgatgttaatattaatgacacagtctaatttatgtatgaattttggggaagaagacacttatccattaatgttttttagttggcttaattttgatgtttaagtattgagtcctgttgatatgcctgttcactgaagtgaccattttatagataagaaaattgtactatcttttcatacacagttctgtgctatttgttgttgcttgcacatgcactatctcatcctctcaaaaacctgtagaggttagcattactcccttaattttcagatgaggaagcgatttccagaaaagttaaggtactttctcagagtcacacagtaaattcatggatcccatatttcctgactctctagagctctttttctgtttattacgcccaggtagatgaaaagcccaagaactgagaagtgcatttgaaatgtgcataaaactatatgcacagatatgcttgtgtttgtgtgtgtttgtaatgtgagacagaatgtgcttcccttgtttcgagttctttgcctttctggttattatggtggtagtgatatgggtatgtttttttttccctttttctatcttttatgtatatgcacacacatatgtatgtacggcagtatcaaaatacagcttgaagtgtgagattagtttttttttgttttttttttttttgagatggagtctcgctctgttgcccaggctggggtacagtggcacaatctcggctcactgcaagctccgcctcccgggttcaagcgattctcctgcctcagcctgccgagtagctgggactacagtgcctgccaccacgcctggctaattttttgtgtttttagtagagatggggtttcactgtccaggatggtctcgatctcctgacctcgtgatccgtccacctcagcctcccgaagtgctgggattacaggcgtgagccaccgcgcccggcagagattagtttttatcatctgtaagttgataggatgggtacaacttctgactggaaaaagaagattgcaagatgtctacagttattacattttatttcagtggataccagaacctgtttcttaaagctaaatgatgagaatttttattattattattaaacaaatctgtgtatgtttcctttgctccttgcttttcaattagatttaaatgatatttaagtagataagaaacaaatacgtgtctgttttcttagaaagaatagtaaattcaatgttgtttggaaatatttgtaggcttttgaattttctccacccttttctacagatgaatgcaaagattttcctaatcattacataagaacataacacttttatatcaattaatggctcatgacctattaaataagcaataagtcttgcttgtatctcaattatgtttttcagtccaaaagagatgggactacatcaaaatcagtttctctggaaaaacatcacatgtaatcttcagtcttctaatgttgacaacagtttatgaaggatatgtgttagtattcagataactcttaagctagctcattgttctgcagtttttactgaatccctgtctttcacgtttcctagcaactggctcacacatggaagatgcaggagtaaagccatcagggatttgctctgcatctatctcttaaacagcatctgagaaatggtagccagactacattgtttcacttcatagtttccactaaaagcttgccttttatgtttattagcttctaaaataggattgccataaaagattagcattaaaaattgagtagtgatgataaaatatcaaagtcaaattattggaaatttttatcagtaatatttcttgaatagtcattgctatttatgtatatctaaaaatgtgatggttactgtgatacagagatgaaataaaacgttttatatttgagaattaaaatctttattacaatattattcctcttaaatgcataagtactttagaattgtaaaataagatgcatcttcagttttgttttccttaaaagaaaagagagcaataaactttaaatatattacatgtatatgtatgtatatgtaactgtactcatatctgtcaattttaaatatttaagtcagcaaattgaaaaatgctttgtgagctaagtgatagattttattttggttaaggaaaggaaaataacaaggacacagccccagtttttctgtgtgagaaaatggtagtaatttgattgtgtcaattttaacacatttggaaaatagaagctacaatatgaatttgtgcttttctgccttatattttcattgccatttaatctttctgtctaatcttggtggtcccaaatgtaaactataatgacatacacctgttaatactactactactaagaacatatatgttagtaaatatgagtactccaagcttgttgagctttttgggttataagaatcttaagtgatgtctctttcatttttaactgtcacggccattttccataattaaccctaggaaggggatgaaaaggaaggaaaacagtgacaggggaaagtggcaaaatagagcaagagaaaaatagaaagaaagatgaaaatgagtgaaagaaaatggctatgagctgtaaaaggtagagtggtagaattcagccaacctgctattgtctttctccctgccacctctgtggtagtaatattctgtttttctcttgcccagtattgagtttgcatatcatgctagcatctgtcaggggagaaatggtgtgatccatggaatattcagaatgaaaatagaataagggtagaaagcacaacgtaatcacttgggtcctcatgtgtgtgctctctttagaatataggctgcttaatcgcccctttgtcctctcctgctttggacccccacccattcacaatatcaattcagggcaaatgaaggcacctccctcactcctctcttctacccctacatcaggcatcgctgagcaaggtcacaggtaccaggggagctcagtggtggtattttggataaagctgtaatccctgctacaattgctgtttctctctcctttgtaaatcagctttggggcaatggtagcatgcatcttactgagatcttaagcataattgcaatcaaagaagaggaacaaggatgcctgcagaacattcaggctcaccaaatcaggatgtgtgagctataagggcaggatgggtgagctataaaagcttttgattttacatcagaaacaaaataactcaactaccatcaccgtttcatttttttttaaaaagatagtagaatataatcttgaaatgaaggacaatactttcaaacaaagaatattaggcaacttcatactgacacacaagaaaaaataataggatggtgagtgggacatatttttattgccctgaattgatgctgtggatgggtgggggtccaaagcagcagaggacaaaggggctggtaagtagcctgtattctaaagagagcacccatgtgggaagagaggggtcttcctcacatcccaaaccaaccaatacagatcaagaaaatcattggtaaacatgagagggacctgcttgactgggagaggctaacatcccattgcctagctagacatgcacttatgaggcgtccttgctaatctgcctcctgtgtctacttaagtaggaacactggagcatgatggcagcaggggagtggggtgaacacggaagatgatgggagcagagcactggagtggcctgaaaaactatcatgtggtagggctacgatgtcacttggagcccatttgagatgaaggaaaaagctttaacccagatataagattgaagttttaaagcaaatggacttacacaaattgaggaaaaggatttgagaactctgctatctatgagaaactgtgggcagttctacaaagcactgctgtgtgaagtaagtagagaaaaacacagtctttcatggttgaactccgtgaagttaagactgtataaggaacaagataactgtctgcaaatcagaggaaacttctctgtggaccagtacaggctcacagattgatttttaggaaagacctaatctggtccaagccttcactttacaggaggaaaatcagtgtttggcacacacttcagggggagagagagagctccgttgatgaaaaaaggagacttgaaccttgaagcctaggtttgagaatcgaatacaattgagactaatttgagtatgtgtttgtgtgagtttggaggtttgaaaagctctgattagagcttttgttgtagagagagttggcattgcttaaagtttctaaactgtgatcatataatgcatacataaagtatggatattaatatattgaagtgtcccaagcacagctgccactagggggcaatggaggccccccacagtgtcacaaccacctagtcgtagccctagaaccagggttgcaagaaaatccctttgcctgcttttgccctgtttccttcagcactgttcagcactatgggtgaatagagcacccattccccagattttgtgcttccctggtgtgtgctgagatactatccccagaatacagtacagccagaaatccaagtgtgggcacatccttcttgtacttttgataatgttgttaagtagaagaactcttactcagaggagaatgcactgctggaacatgtgttagaagttaaagtccacactccccatgtaaaatatgtatttatctctcatgtgaatgttattcattcaatcattgagcatttattgagtactctgtgtgcttggccctcttctgtcctcagggatattgtgaagagatagagacattcctgctctgttagaaggaactcactttccagtgggaggaagatgagaaataaagaagtaaataaatatgtgtaagactactttatataataaaaggaactaatatttgatcgttatgactccagaatacatggccataggtgttactagagtagacatagaacaatagaactgtatataaaaggaaggagtcctagacttggaataatattttctcctcactggcttcctgttaaaaattagagctatagtcctatcagagaaaactccaggagaataaaattgtgattttgtggccaaaaaacccaagtgtggatgcaaccataaaccgatcactaagaacacatttacattatttaggagcttgatgtattttacagtaatttctcatctgtaaaatttcctgacagcagtggcaattttctttttgtttacccaaaccttgatcctcttctggatcatggggattaatttctttactggggattctctcaactagaacattaaaagtctgcttccctacagtgtattcttatgcaagactttgtggaaaaaaagttgtgcatatggcgatgatatttttagccctttccatgtcagtcaagcctgaatcttcttttaagacctagtttcagtgtcattggttgtgtgtgtcttcttccctggcattctccataacccagccagagcaagacatccatttttgattattcattcactcagaaaatgaatacctgttacatgccaggcaccattgggggcactgaagatttggcagtgatgaatgaaaggaagcctgccttaaagttttatttctagtggggaggggtgaccaaggaacacataaacatatgaaggtggtaataaatgttaacagataatggtgataaaaggtaaaatttaatgagcagattgataaaggatggttgaggatattgaggcaagagggttgcacctttttataggttggtccaggaaagtcagagaggtggcatgtattcaaaagactaaaatacgtgaggagagtgagccatgtggctatctgagtctgtgtgggtaaagcagaattggcatggagagtttcagggggtaagggcagaagaccagattatgtagggactgtgaggatttaggcttttattcaagaatgagaagggaagccactgaagggttatgagtagaggactgacacagcagacttaggtttacaaaggctcatctggctcctgcgctcagagtacatggagtgagacaatggtggaatctggccccttaaattggaggctgttggaataatttgggaaagagatgctggtggcctaggcctaggtgattgctatgggggttgtgagaggaggcgacgtatagagttaacaatatttactgatgcattggatggggatattagaagaagaggaatgaaagatgactcaaaggtttttgacttatatatgataaaaatcttaagctttggtcataagctatgaatttaacaacttggtttcctctttagcagcattttcctcccccccttccttccttccttccttccttccttccttccttcctccctccctcccttcttccctccctccctccctccttccttttctccctctcctccccctcctcctccttcccctcctcctcctagtcttcttcttcttcctctttttttcattcattctttttctctttctttctttcctttgttttcttttttctttcttctttctttctttcgttcattctttctttctttttctccttccttccttcctctttttttaaatataaaaacaggcaagtttcatgaaagataactcacacaataagtaacatatctgactaatagatatatgaaaagatctttattttccaccagttaaagtaatataaattaaaacaatgcaataatttttttcaacaattatgttgttgatgattagaatattgataataccaatgtgccaaagtatgaaaaaatgattactcttttacacattattacttggtggcagcttatattggtacaacattttaaagtggcaatttagcactgttaaaaataagacatttacaaaactttcggcccagcatttttgcatctgggaatctatttaaaaaaaactgtccctacatatatgcaaagatatgtacatctagaagattgttccttgcaatattgtttgtagtcgcgaaaaactggaaaccatctaaacatttatcaataggggatttactaagttcagaccaaggcaaagaattaatagtgatgattttcacgggtagaattggagggtcagtgggggatttcactctttttcttgtgtgcctttattttaatgttttactatattaaacagtacttttacagtaagaaaaatatttcaaaagttatttttagaaaaagcctcaaaattattttgatagaataataatacaaaataagcactcacaagtatatgacagcattatattaaaaagattaaactgtagtaataaaggataatcccaggaatccgatgatgctttattacaagaaaatatatttgtaatttatcaaaaagtgaaaaaaaataaatttgacctttggcagcttttcaagtaaccttttggttttaagaaaaaacagtgtataaatgtataaagatcatggtctcaggtaccttctacatgctgttgattactaaattcatagctgtttgaatatctcaaaggatgcagtagctattaattgagaaggactgtgagagaaacaggttattgttattattttggggaagggagtcaggagtttgcttttgacacatttcatttgagatgtcttttagacatccagctgaagaaattgagtagacagttggtgagcaagttttcggttcaagagacagggcaaatttggagatatgaatttgggaatcagcagtgtatagatgtatcatgatttttatacatgtgtcagttgcagcacttacctcattattttgtcattgtttgttgacatatttgtctgtctacattaaaatccttgggggcagagaccacatcttgtttgacattttaatatttcattcatggcaatcttgccatgatgtgaagctataggtttgttttctttggatatgattgactggagctatgattaacttaggctttgtccagggaaagccatttttcttaaaactaaaaggttatagcttaaaggcagccaaaggggaaaccaggttgttaaatttatagtttatgatcaaagcttaagatttttattatctctaggtatttaaatcttgccctcaattgctgatatccttgtgtctctaggaaataacatgccttttgatggctcaactcagtacacagtcataatctaggcacaaatggcagctttaaccaagaccaggcttgttgccttcgaggaaataaacttcatgccaactcagactgttggcaagcaccatagatatgcctgagatttgttctctttgaaattggtcggtttgatcagtgtggtctacagactgatttctgtccataaacaccctccctctttttttttttgtctgctaagatacatttaaaaaatctttttttttttggtctgcttaaatacaggttaaatacagaaaaagagagtaggcatatagaaagttttatagcaatcagtcaccgtaattttatgtctattgaatttagttttcaaaattgtattttgtgtgccttttttcattttttttcagtaattcatttcgttgtatttaacaaaagtatcaatctgcaacagattgaacttaaaaaacattggtccttcctccatagtttgagaaaccatgcactagttcatatcacgaagcacctcatagattgagagctcagataaatcagtggcgacgaggtgggtgaacgtgtagtaaacaggcatggatcagtatctccagaatatgtgtatgctttgaaaataattctgcaatggtccaaatgtttgtgtccctactccccaccccaattcatatattgaaatcctaaccccaaggttaggccccatctcccgatgaccccatctcctaatataaatcctcacctggaggttaggatttatattaggatatggggcctttgggaggtgattaggtcatggtggaaccctcacaattggaaccaaggcctttattttaaaagcctgagagagatctctcccctcccgtcatgtgaggacacagtgatgtgctgcctgaaccaagacacaggccctcaccgcacagtgaatcttctggagccttgatcttggatttcccagcctccagaatggtgagaaataaacatttattgtatataaacccctaagtttatggcactattatagcagctgaaatggactaagacaaattctttactccatttttcgtatcatgacttattgaaggaggtatgatatggtagcatgaaaagaggtaaagaaccaccctactgcagagaacagaaaaggtttggagtttgatttttgttgattaagctgcctgtgatctcaagtctggcatttaatgggcagactataaggtatgtgaccactgctggattttgtaaacatttcattttagcattcaagctttagatgtgtctttctgtatcagtacattgttttatgctttcctaaaagcagccttcttgtctacaacctctccatgcactgaattcctatgcactgaattcctaactttattttttagctcctggaacacttttatacctttcatttctcttttgatacttcaagcagaagctatttagagacacactgtgaataaatcattttagtcagttccttaatacttttcttaaccattattacctcctatgaataattttatttcacttttattaaataagcagaggtaatctgcatcagagaatgcaaataatggctaacttggtaattttaggaaagagaaacaggcagatataggcataacagtaaagggaagctaaaagaattctaacaaactaacaccaagaaaccaacagcaggaggagtagaaaacagagcactgggaagagagacaaaattgcgataatcatgatttcctcgagacagtgtttggagatggtttccctttgtttttcattttttgtaattttccagattgtgaacattaaccatgtattactattattatagttaaaaattgtttgcatatatccctcccccatatgtgtgagtaacttaagtataggtaacagaagcaaactggtgggtttggtattctagttatgatattctcgcttttatggggcataaaaatcattgtcagattcttccttcttggtgatttccccagtggcctcccatagattgcttcttcgtctttgtaaagatatatgacagcaaatctctaccagttaatgagcacgtgaaaagctatctatctaagggctgtgtgttttgctacttacaaagccgtaaagatgttgacaaaaatatctgaatccctgtaggatattctccatttttcatcaagacggacattagcctcttaaaaaaattaactgagagaaactgttgactaccttttaagtaacatcatcaaagaagtaaatggctttgattttttttaaaaagcagtttttagaaattatgaatggaatatattcactggatattagtaatccagaacttctgcattaaaccttcataattaattgtagtaatgcttttctaaaaatttactttgtctattgtatattacacaatattgtaatctagttttggtaccaggaatttacacttaaattgggtaaaaacaaaagttaaatgaaaaacatttaactttttaaagttatttttatttccgtctcttttattaaattctttgtttatagaagattgcacttaccgttgctctgttctcatattttataagcacttttttttttattatactttaagttttagggtacatgtgcacattgtgcaggttagttacatatgtatacatgtgctgtgctggtgcactgcacccactaactcgtcatctagcattaggtatatctcccaatgctatccctcccccctgcccccaccccaccacagtccccagattgtgatattccccttcctgtgtccatgtgatctcattgttcagttcccacctatgagtgagaatatgtggtgtttggttttttcttcttgcgatagtttactgagaatgatggtttccaatttcatccatgtccctacaaaggacatgaactcatccttttttatggctgcatagtattccatggtgtatatgtgccacattttcttaatccagtctatgattgttggacatttgggttggttccaagtctttgctattgtgaataatgccgcaataaacatacgtgtgcatgtgtctttatagcagcatgatttatagtcatttgggtatatacccagtaatgggattgctgggtcaaatggtatttctagttctagatccctgaggaatcgccacactgacttccacaatggttgaactagtttacagtcccaccaacagtgtaaaagtgttcctatttctccacatcctctccagcacctgttgtttcctgactttttaatgattgccattctaactggtgtgagatgatatctcatagtggttttgatttgcatttctctgatggccagtgatgatgagcattttttcatgtgttttttggctgcataaatgtcttcttttgagaagtgtctgttcatgtcctttgcccactttttgatggggttgtttctttttttcttgtaaatttgtttgagttcattgtagattctggatattagccctttgtcagatgagtaggttgcgaaaattttctcccatgttgtaggttgtctgttcactctgatggtagtttcttttgctgtgcagaagctctttagtttaattagatcccatttgtcaattttggcttttgttgccattgcttttggtgttttggacatgaagtccttgcccacgcctatgtcctgaatggtaatgcctaggttttcttctagggtttttatggttttaggtctaatgtttaaatctttaatccatcttgaattgagttttgtataaggtgtaaggaagggatccagtttcagctttctacatatggctagccagttttcccagcaccatttattaaataggggatcctttccccattgcttgtttttctcaggtttgtcaaagatcagatagttgtaggtatgcggcgttatttctgagggctctgttctgttccattgatctatatctctgttttggtaccagtaccatgctgttttggttactgtagtcttgtagtatagtttgaagtcaggtagtgtgatgcctccagctttgttcttttggcttaggattgacttggcaatgcgggctcttttttggttccatatgaactttaaagtagttttttccaattctgtgaagaaagtcattggtagcttgatggggatggcactgaatctgtaaattaccttgggcagtatggccattttcacgatattgattcttcctacccatgagcatggaatgttcttccatttgtttgtatcctcttttatttccttgagcagtggtttgtagttctccttgaagaggtgcttcacatcccttgtaagttggattcctaggtattttattctctttgaagcagttgtgaatgggagttcactcatgatttggctctctgtttgtctgttgttggtgtataagaatgcttgtgatttttgtactttgattttgtatcctgagactttgctgaagttgcttatcagcttaaggagattttgggctgagacgatggggttttctaggtaaacaatcatgtcgtctgcaaacagggacaatttgacttcctcttttcctaattgaataccctttatttccttctcctgcctgattgccctggccagaacttccaacactatgttgaataggagtggtgagagagggcatccctgtcttgtgccagttttcaaagggaatgcttccagtttttgcccattcagtatgatattggctgtgggtttgtcatagatagctcttattattttgaaatacgtcccatcaatacctaatttattgagagtttttagcatgaagggttgttgaattttgtcaaaggctttttctgcatctattgagataatcatgtggtttttgtctttggctctgtttatatgctggattacatttattgatttgcgtatattgaaccagccttgcatcccagggatgaagcccacttgatcatggtggataagctttttgatgtgctgctggattcggtttgccagtattttattgaggatttttgcatcaatgttcatcaaagatattggtctaaaattctcttttttggttgtgtctctgcccggctttggtatcagaatgatgctggcctcataaaatgagttagggaggattccctctttttctattgattggaatagtttcagaaggaatggtaccagttcctccttgtacctctggtagaattcggctgtgaatccatctggtcctggactctttttggtgggtaagctattgattattgccacaatttcagctcctgttattggtgtattcagagattcaacttcttcctggtttagtcttgggagagtgtatgtgtcgaggaatgtatccatttcttctagattttctagtttatttgcgtagaggtgtttgtagtattctctgatggtagtttgtatttctgtgggatcggtggtgatatcccctttatcattttttattgtgtccatttgattcttctctctttttttctttattagtcttgctagcggtctatcaattttgttgatcctttcaaaaaaccagctcctggattcattgattttttgaagggtttttgtgtgtctctatttccttcagttctgctctgattttagttatttcttgccttctgctagcttttgaatgtgtttgctcttgcttttctagttcttttcattgtgatgttagggtgtcaattttggatctttcctgctttctcttgtgggcatttagtgctataaatttccctctacacactgctttgaatgcatcccagagattctgatatgttgtgtctttgttctcgttggtttcaaagaacatctttatttctgccttcatttcgttatgtacccagtagtcattcaggagcaggctgttcagtttccatgtagttgagcggctttgagtgagattcttaatcctgagttctagtttgattgcactgtggtctgagagatagtttgttataatttctgttcttttacatttgctgaggagagctttccttccaactatgtggtcaattttggaataggtgtggtgtggtgctgaaaaaaatgtatattctgttgatttggggtggagagttctgtagatgtctgttaggtccgcttggtgcagagctgagttcaattcctgggtatccttgttgactttctgtctcgttgatctgtctaatgttgatagtggggtgttaaagtctcccattattattgtgtgggagtctaagtctctttgtaggtcactcaggacttgctttatgaatctgggtgctcctgtattgggtgcatatatatttaggatagttagctcctcttgttgaattgatccctttaccattatgtaatggccttctttgtctcttttgatctttgttggtttaaagtctgctttatcagagactaggattgcaacccctgcctttttttgttttccatttgcttggtagatcttcctccatccttttattttgagcctatgtgtgtctctgcacatgagatgggtttcctgaatacagcacactgatgggtcttgactctttatccaacttgccagtctgtgtcttttaattggagaatatagtccatttacatttaaagttaatattgttatgtgtgaatttgatcctgtcattatgatgttaactggtgattttgcttgttagttgatgcagtttcttcctagtctcgatggtctttacattttggcatgattttgcagtggctggtactggttgttcctttccatgtttagcgcttccttcaggagctcttttagggcaggcctggtggtgacaaaatctctcagcatttgcttgtctataaagtattttatttctccttcacttatgaagctttgtttggctggatatgaaattctgggttgaaaattcttttctttaagaatgttgaatattggccctcactctcttctggcttgtagggtttctgccgagagatccgctgttagtctgatgggcttccctttgagggtaacccgacctttctctctggctgcccttaacattttttccttcatttcaactttggtgaatctgacaattatgtgtcttggagttgctcttctcgaggagtatctttgtggcattctctgtatttcctgaatctgaacgttggcctgccttgctagattggggaagttctcctggataatatcctgcagagtgttttccaacttggttccattctccgcatcactttcaggtacaccaatcagacgtagatttggtcttttcacatagtcccatatttcttggaggctttgctcatttctttttattcttttttctctaaacttcccttctcgcttcatttcattcatttcatcttccgttgctgataccctttcttccagttgatcgcatcggctcctgaggcttctgcattcttcacgtagttctcgagccttggctttcagctccatcagctcctttaagcacttctctgtattggttattctagttatacattcttataaatttttttcaaagttttcaacttctttgcctttggtttgaatgtcctcccgtagctcagagtaatttgatcgtctgaagccttcttctctcagctcatcaaaatcattctccatccagctttgttccgttgctggtgaggaactgcgttcctttggaggaggagaggcgctctgcgttttagagtttccagtttttctgttctgttttttccccatctgtgtggttttatctacttttggtctttgatgatggtgatgtacagatgggtttttggtgtggatgtcctttctgtttgttagtttcccttctaacagacaggaccctcagctgcaggtctgttggaataccctgccatgtgaggtgtcagtgtgccgctgctggggggtgcctcccagttaggctgctcgggggtcaggggtcagggacccacttgaggaggcagtctgcccgttctcagatctccagctgcgtgctgggagaaccactgctctcttcaaagctgtcagacagggacatttaagtctgcagaggttactgctgtctttttgtttgtctgtgccctgcccccagaggtggagcctacagaggcaggcaggcctccttgagctgtggtgggctccacccagttcgagcttccaggctgctttgtttacctaagcaagcctgggcaatggcgggcgcctctcccccagccttgctgccgccttgcagtttgatctcagactgctgtgctagcaatccgcgagattccgtgggcgtaggaccctccgagccaggtgtgggatattgtcgcgtggtgcgccgttttttaagccagtctgaaaagcgccatattcgggtgggagtgacccgattttccaggtgcatccgtcacccctttctttgactccgaaagggaactccctgaccccttgcgcttcccaggtgaggcaatgcctcgccctgcttcggctcgcgcacggtgcgcgcacccactggcctgcgcccactgtctggcactccccagtgtgatgaactcggtacctcagatgtaaatgcagaaatcacccgtcttctgcatcgcttacgctgggagctgtagactggagctgttcctattcggccatcttggctcgagagtcaagcactttgttaaagagatagtgtgactctaaagtacaagttggtttcttcaccaattaagagttcttccatttgggggagatggactgtatttttgtgatgctgccatttgttgctcagaaaacttctatttttattagaattgccttgagagccaatttttgagccataaaacgtttcattcactcactcaacaaaaatgtattgaaggcttacttctatcagttctctctagatgccagatatactgcagtgagaaagctacatggttactgagctcacagagcttacagtgtggtgggggagacattaatgaaaacacacacgtgaaatacacaggcctctgaagaaaaattatcataaagataataatttagataggagggaaatgggcatttaggggaggcatctctggtaatgccagagaaagggtgaagaccatgagccaaggccctggattgagccacaacttggcacaactcattaatttataggaatctcttctttttgatctcaaatgctttcactcaactgaataagccattttagcaataatgcttgcctctggattactgccaaaagctaccttgattagcagagagtgaagatttgtgaccactgaggatattcggagtgtgtcactggctctgaagatatttctaaaagattttcagttatattttgagctgtagcaacatcaaggaaataattttgtaacctccctcccaagatgactttgaaggaaacgtatttataaattctgatgtgttttttcagccacattatttaataaccgttcttgatgtaatgagaaaaagactgtgcctcttttcagagaagctcagtctactgctttcttttccttcttgagaaagtgaacactgagacaaaataatctctgcaacaacgaaggaagttctgtttgactcagttgctaattcaatggctgaaagagatcagagacacagtttgatatgtgggaacattagaaactttgaggggtttggggttagataaacattgaccttaccactcactagctccttgatctttgaaaagttactgagcctctttgagcctttgtttgctaatctgcccaatgggattaatactacaaacctcttagggagcactgcagattaatctatatagagcttgaatctagtaggaactgaataaacatgagctcatgcctaccttcctctttccaaacccctcatccttttatctgttaccatagatgtcaaactctatgaaatccagtcatttagcttaaagtacgtatgttgttttcatgctttccttcctgatgttgtttaaagttaatttttaggaaaacattttaatgcattgcataagatggcaatgctagggttagggctaaagaaagacaacatccttgagtttttctacaggtagatttcattttttatcttaatgataaggccagaaagtgccaagagatgttaagtgtccagaaagttggaagttttggtttgggttaggtagaaggtatacaatgaaaacatcttatataaaatatttaataaagtcagtttggttctccacacacacaaaaatgacatactgatgattaaaaagtgaaacatggccaggggcagcagtttcactcctgtaatccaagctacttgggaggctgaagcaggaaggttgcttgaggtcaggtgttcaagaccaacctgagcaacatagtgagacccccccagtctttaaaaaaaaaagtgaagatttaaaaattaaaacattgttacaagtgggaaataccagaggtaacattaatgaaaattaactattctaatttcaaatgaatcgtggaattaataaatgtgttcatatatggtctgcttcagctagaatatatctctcttgtttgcaactctgcggtcatgaagtcaacccttatggcacttatcattgtctactttggtaagtgccacgtaccattgtgtttcttgacatcaaggaccatgtctaatttatcttggagcctaccatacagagtcctggtgctgatggtgaattgcatttgacagtaactaaaaagatggtgggatatggagaggttaagtaacttgcctgttctaattttgggtgttgtttatgggggcagctatgtccttgaacttgctgtaatgctgtcataatgggtaccccaggtgcttatctaagggtgggctgtctgttttcagccccattagaagacaaaaagatgaactcctgagcagagctgacaccatgtgacaattgtgcctcctctgtgtttcacgtatctgattgtgatgtcactgttttgattagcagttattatatttggaaacttagcttagaatggagcactcctagtctgctgtttgttagtgcacatagctatttagaatcttcaactttaagaatccggtttgatgcttatttacaactgaagattcataagcaaatatacgttattgaacatttgtatccgttggctccttagagttgctccatccatttgtgatgcatgttaatagagagtgaaataaaaatacttgcatttaaagagctacatctgttttgtgcatgagtcatctgaagtttggacagctattctgatcaaataaataaatcttcctccagacaggtggcttacttgaatacgtctaacttattttcagttccttctgggaaatcttacatttagctgcagtctctaaactgttttatctgccaaggataagctggcaatgggaagctttaattagaattaatggggcttgccatggagaaatttagaaaatgtctactaccttttagtggcacaaatatggcaaaaatttaggcattgtctaagtcatcactgaacaaaccttattacacgaacatatttttatgagaattcagaatgtctgaacttagagtgtctgaatttagattgtcttaaaagaatgtacgtagttaaaatatttagttggtctactattagggaagataaatttttttcacttccctcctttggcattattttcttcctattccatagcaaattagcaaactaaaatgtaagtcaggtggtggggagtgcttttaaaattaggatttaacagaaagtaagtatacattttgtctgagtgaaatttgtccttcatatctatctgttgcatgtctgtttgtctaaactgaaggtatttgttaaaagcatcaccataatgaatagtaattcagccctttccaggcctagcaaaagcatttgctcatgtaacattaaaacattgaaaagaaagaatgcatgccttttgatgctaatatgaactttaagatttctgaatggaaaagtaaaatttagctatagttttataatacataaaagtgcctgaacacaaaacacttgattaattcaaaatttaagaaatgttggcaatagaaaagaattttgcctgtaagttttctgtgaaaaattatgtaaaaggcttacaggaaaatgtaaggtgtaaacatgtaaggggagcaggagaattatattgcaaaattcacagtgtaaaacttctcaattagtttacaggcaatggtattcagtgatattcatcattgccccatgccatttgtctagaattgtgtaaattgctacataatacgatattttaataatttgaacgtatcttatgattttgtagttttgcatttagagtctcaatgaagtgcttcaaaagtggtagaagatactacagggactaagaaaacttttataaacactgtgatgctttaacaaaaactcagtcatgtacctgtaaatatcagaacccagtaaggggagctagcagctgttgagtgtatgccttgtccaggcagtatgcatgcatcatcttggtttgcgtcatcatcctgttttataaatgaggacaccaaaaacaggcaggatggttagcaagaacatgggttgaggtcagatatggccccaaccctctctgtgctgttcatatgtaagtgggtgactttggataagctgttgaactgggattgcagatgaatacactggtcaagaggaagagttttggtttacgattcttgactaagttctagctgtagtagttatcagttctgggatctgcataaacttcatctgtaaaacaggaatgataacactaactcatatatttgttgtgagaattaaagtatataaagaagttaacatggtttgtggaaaacagcaagtgctgatacattgtcagtgataaagataatgctgctactgctgctgctggtagggttggtagggtagaactcttacagaaactgaggcatgtctaattccagagcacatgcttttcccactgactctggtcctggaaaagatcagacagaatggtatggaaatgtgccttgaatcacaagcagttgtcgtttttgaagtagaaaaactctttccaaaaatatacaaattatggaccactctgcagatggaaattagaaccaaatgcatggaaattagagcctactaagagagaaaaacaagacaacaaatacatccataccttgacctctgatagcagtaagtgctctgaagaaatgcagcctaagtgattagatttaacagacaggtgtgagggaaagatgactctagttgcttaagcacctgggtgaatgggggatttatttcatgaaggggggaatgctgaaggagaagtgagtagccgaggaatcaagagtattgtcttggctagtacaatttgagataccagttgtatatttcaatgcagatgtggaataagaagtcagatgtgtgacagtggagctcagaggacaggttggcatgacagtgttgatttgggagtcatgagattggaaaacatccatgaggaacccctctatggggagaagagaaggaatctgggctctggggcattccaaagtttggatatcaggaagcaaagctgaatccagaaaaagagactgaacagaggcttccaatgatacagaagtaaaaccaaaagaaagtggtttctgaaagccagtgaagggagtgtttcaagaaggagaaagccactgtttccaatgctgcgcttagtttaggtgagatagcagagacttgatcattgaatctgcttagtagaggtagttggagagcttgacaagaacaatttcagtgaatttgtggagaggaaagcctgcttagaatggagttgaggagacagtagaggcaagaaagtggaagtaaaaggtatagagacattgattgattgattgattgagatggagttttgctcttgttgcccgggctggagtgcaatggtgtgatctcggctcactgcagactccacctgccaggttcaagcaattctcctgcctcagcctcctgagtagctgggattacaggcatgcaccaccacgcccagctaattttgtatttttagtagagacggggtttctccatgttggtcaggctggtctcgaactcccgacctcaggtgatccacctgccttggcctcccaaagtgctgggattacaggtgtgagccactatgcccagcctggtgtagagacttttaattagcttttctataaatcagggcaggagaataagatatgaactggagaatgatatgggttttttaaaaggttgatttttcagttttattttactatgaatgatactacatcaatgttctctgctgatgaagaagatctaatagatagggtaactgacgttgggattgagggagagataattataggagcaatgttctccataggcttaaagagtatgatcaacatccaacatagagaggttgatcttttcacattttggatggcagatgatatgggccaagatgcagggagattgcagatttggtgggaagatgaattagttctcttctaattgcttctgtttcctcagtgaaataagaactgaggtcattagcaagtgcagtatgatggatgagtcatgttaattaaccatcatctgcataaactgcattcttgggcagcaggctcttgggagatcatttcgcaatagaattttgctttgtgggctatgttccctgccctactttggccataagtgctgttcctgtgttcctgccatgtgattcttagagataacaattgaccatcagtgaagagcctactttataccttcattttttcactggtaactctgaaagagtatattttatcagatggtagtctaagaagtaaagcagcaaaatcaatttatatatatatatataaatataaattctatatatataatttttatatattatatataatttatatatatatttatataaaaaaaaatatatatatatatatatttttttttttttttctggagacactcttgctccatccccttatctcccaggctggagtgcagtggcgtgatctcagctcactgcaacctccgcctcctgggctcaagcgattcttttgcctcagcctcctgagtagctgggattacaggcgcaaaccaacatgcccatctaatatttgtatttttaatagagacagggttttgccatgttggccaggctggtcttgaactcctgacctcaggtgatctgcccacctcggcctcccaaagtgctgggattataggcatgagccactgttcccagccacatttttattttttcttgtaggcatatatgttgttccaaacccctaacataaactatatggattgttatagagtgtgtcagaaggtaatgggaggaagcaactgcactatgaatttactccctgtcataaagaaattatattatagagcctttcatccacccagagatgttgacatgactcaggctgattctgaaatgatggaaacaggttatggttaataaactcttgtactttttgccagaaaaggtaatatttcaaattcttttctaatgttagaccttaatagaaataaatgcttattaggtgaaaaacatctaaaggaaatatttttaaaaaccaaattatatttttatttagttcagtaatcattcattgagcacttatagtaagctaaactatgggaataaacagttgcataattacgaatgattcaatgactttgatcttgaatttgttgcatacctgcagctgttctacattgtttattgggttgtattttgtcttattcccgaaatgattttaggaaacttatggaagatacattcaaaaatgtaaataaatataaattataaaataggaactaaataaaaataaaaacataataatatgggaagttaagaattagaagagaaaatcaacactaggggaagagctaaaatatatattagtgaccgtaaaggcttaaacacttggtaaagatttgttgcatatttgattctgagcttcttatcagccataccggaaagaaaaatgcagtccgttacatgattcttattgttcacaagggggaaaaaaggtcactcaagggaaaaaatacttgcactggcatctatatagttttttacatgagttttcctatagggcatacccaatgtgaatggtgaaaagtattgatagccaatgtaataatgcaacttacaaagttacttcttgaagcatcaggaccctgatattattttggtgatcaagaaaaagatcagaattagagatgaaaattgtgtgtgcatgtgtatgttttgttttttaaaaccaaaagattgaactttggaagtaaaagagacaggccatggtagaattacctaaggacttggggtaaaatcttggagatggcctgcattaagggtaacagaagagaagaatctcataaaggttgctgaaatgaaacaaagaaatgttagaggaggaacaaaattctgtagtatcacaaaaggcaaaggtaccaatgagtgtattaaaaaagaatcatctaaggatatgaaatgcgaagagaccacttcactgttggtattaccaagtagagtttaattaatgactttttgagagtagtttcaatagaacaagaaagggcaactttcttcacagaattggaaaaaaccactttaaagttcatatggaaccaaaaaagagcctgcattgccaagtcaatcctaagccaaaagaacaaagctggaggcatcacgctacctgacttcaaactatactacaaggctacagtaaccaaaacagcatggtactggtaccaaaacagagatatagatcaacggaacagaacagtgccctcagaaataataccacacatctacaaccatctgatctttgacaaacctgatgaaagcaagaaatggggaaaggattccctgtttaacaaatggtgctgggaaaactggctagccatatgtagaaagctgaaactggatcccttccttacatcttatacaaaaattaattcaagatggattaaagacttacatgttagacctaaaaccataaaaaccctagaagaaaacctaggcaatacctttcaggacataggcatgggcaaggacttcatgtctaaaacaccaaaagcaatggcaacaaaagccaaaattgacaaatgggatctaattaaactaaagagcttctgcacagcaaaagaaactaccatcagagtgaacagcaacctacagaatgggagaaaatttttgcaatctattcatctgacaaagggctaatatccagaatctacaatgaactccaacaaatttacaagaaaaaaacaaacaaccccatcaacaagtgggcaaaggatatgaacagacacttctcaaaagaagacatttatgcagctaaaaaacacatgaagaaatgctcatcatcactggccatcagagaaatgcaaatcaaaaccacagtgagatatcatctcacaccagttagaatggcaatcattaaaaagtcaggaaacaacaggtgctggagaggatgtggagaaataggaacacttttacactgttggtgggaccgtaaactagttcaaccattgtggaagacagtgtggcgattcctcaaggatctagaactagaaataccatttgacccagcaatcccattactgggtatatacccaaaggattataaatcatgctactataaagacacatgcacacctatgtttattgtggcactactcacaatagcaaagacttggaaccaacccaaatgtccatcaatgatagactggattaagaaaatgtggcacatatacaccattgaatactatgcagccataaaaaaggatgagttcatgtcctttgtagggacatggatgaagctggaaaccatcattctcagcaaactatcgcaaggacaaaaaaaccaaacaccacgtgttctcactcatagatgggaattgaacaatgagaacacttggacataagaaggggaacatcacacaccggggcctgttgtggggtgggggaaggagggagggaaagcattaggagatatacctaatgtaaatgacgagttaatgggtgcagcacaccaacatggcacatgtatacatatgtaacaaacctgcacgttgtgcacatgtaccctagaacttaaattataatgtagatatatatatatatatatatatatatatatatatatatatatatataccaaaaaaaaacaacaaaaataaaaaagaaagggcaggcttagagagtaaagtgtcagtaatgggaaagtgtgtatagacctcttctttcaaggaatgtagaagtgacggaattgtaggttggtagacttgggatagagggattgattggcaggcaaggaaggggaataatagtgtacaagatcccagaggaggagggagacctgacatgttcaacatagatggggttcagagaggaaagagtcaccatttttgctgagctacaaggaaaaaacaaacagaaataccgagaatctttgtgttggaagggaggtgatatgtttggctgtgtctctacccaaacctcatcttgaattgtagttcccataatccccatgcatcttgggagggacctgatgggaggtaattgaatcatggaggcagttacctccatgttgttctcgtgatagtcagtgagttttcatgagatctgatggtttaataaggggctctcccgccgcaccaccccacaccacccttcactctgcatatctccttgctgccaccatgttaagaaggacatgtttgctttcccttctgccatgattgtaagtttcctgaggcctcccaaaccatgctgaatggtgaatccattaaacctctttcctttagaaattacccaatctcgggtatgtctttattagcaatatgagaatagactaatacaggagggaagctataggaatttgtatcagatggcttctgaagtggttcaagatttttgaggtaatttgcaaagtgaggtgaaattatgtgtggatagggaatctatttaagtcatgacttcaggtcaaaatacaatgcttagaacatacctttttgaggttatgtagataccattttctgtctttaaatatgtcagttctttgctttcttagaaataatttagcttgccttgctacctttacaccatccaactcccacaggtgtatttctttctcttctccttccctcctttcattaaaaggccaaatggatatatatgacaatgaagtaaatgagctttataccaataggctaagtaatttatgaatagtactttttagaaaagtgctaggaaaatggttcttcactattttcctaaaacatttatagaaacttgatgaataatgaatgggaataatttataatagccacatacttcactcaaatagaacacttgtttatactcctacacagcagttacgtcatggctgtattttacataaggagtcatatatttttaatgtaaatgttgctagaatagtttcattcagtagagttatagaatcttggtgtcttaagagatctcagaggacagggtatccctgagaggcactcagctagacattgcttcacttctgcctaaattgtgcattccagtgatcatgagccatgctaaaatacagcataaataagtcatcaataagttgaatagcaaggctaggattgtgtctacatctttgctaatgaatataatgctagactttttatatatgcataacagatttaatcaatgaaaatatgtagaaacaagttttattttacagttgagttttgcagtacagtgggaagattgcatttttaaaagacaaaataagacttagcattcagaaaaagtagctggatcaaagcaatttctaagtagaaactcaaatttcagtcagtattttaaatagacacatcctgactcccttcacagattgccactgaccatatggtaactgcagacatgcctcaaaataaaacagccatatgtagattttcaaatactgacctcatccctagagagccatatttatctagaagagcatctcaagccatatcaagtagaattatgatttgtgtcatgttcaaagattagaagaatcagcctaatgaaaaacaatcacaagttaaaagcaaaatgccaaggaaaataaggttagatacccacagacatttaaaaagcaaaggcatctggagacgtatctttcgaattctccttgcccagtccttatacacagtaggaaagcacataaaagtagcattaaaatctatcctgtgctatggccatcagaatggatttaggggaatgcttaagggatgatcaataggagtgcttggcatgcgtatttcttctcagactagcagtcactggatgcaaatattttctgtctgctgaatgtgctaatggaataccaatattatttttttctaatttctattgttaaaatttctagagcagaacatgtggaactcacttctatggtttcctgctgttaatcattctctactgaaattctgccagttttccagaacatttagctttgtgggcatgtgtctgtgaattaaaaacatggaagaaggaacagaattgttgcaggaatttggaacaaatctatttatatattcagtggtacctcacttcccttatcaaaatcggggtggagaagggccagaaaaggggattcaggaagtaaaggtctacaagtaataagaagattctgtaatgatgatcattgtaactacaaaacctctctctctcacgctgtatttatgtatttatacatatacatacttctctctctctctacacacacataccccacctctctctctctctatatatatatatacacacacacatctctacatacatatgcatacatattttatatttatatatgtgtgtgtatcatatatatatgtatatatatatgaaaaaaagattttaatgacctccttatggacagtcaagccccgcatcccataggtgtagtattatgctagcagatttctcatgtccaagttttgtttaaatctgagcactcagggatatgccagttgcctaaaattaataatgttaatcattcctaaatgttctttaagagctttagtttttcctttgcattccttttaatgtagcagtatttcattggatttggttcagtgattgtgtttcagacatagtgatatatcataggtttgccttcaaatcaaatacagttatgatcctgaaggaaattacccttataggccaaactctgaaaattgtactctatcctaaaaggtcactgaaatttctgaactaatctttataatacatgaataaacctaaacattgttttttacaaagcaaggcccctcactagtgtatgtcactggatatataagtagacatctgtgaaatttatttttgaagtattattttggtttcttggtacgtaaattggattactttattctaagccaggtttgtaagtagtttttaaaagtcatttgaacccattcagattactcaggctctttcactgtgttatctcattttgtactcttcagttttgctaaatgtaacaagaggagactttaacagaaaaccttaaaatgttttctgcaataaaaagatcagttcttcatagaaatccaatagcattgtaaaattaaaactaatgttccagcataataatgtccataaacttgcttttcaatattaattcatttttggtattgatctcataagggagtgtttagttaccaactgctttaggccatgaaatgttttggggcaaagaaaattgaagggattgttttggtattatgttgctcttaacagatttttcaggaatacatagaactgtgttagttagctgacatcttttctgttatttaagttgtatttaattgggaaatattatatcttgtcatttgtatctgattgttttattggagaggtttttttcctgaaaatttgtaaaataagacaagaagactaaatggcttatctaataatttttttccctatagaaatctagattttgattcatacttaatgtgtagatcagcctttccactaaggttctcaaaggtggctggccttctttactaactgaaagcaggttcagcagcctcttatagctttcatggaaagagtttaattgaccaagatagactgtgtgttcgtcagccttaagaagagagatttgttttatttatatgctatgacataggatatgatgggattgtctttatgagaaaaatagatcctaagatccagcattcaccttgtgacctccaggaccctgtgcaccaaccctcttgcatatggtgaccaaattcatgtatgcatcttccttgtaggctctgtcagttatgttcccgacatggtaaagatagttttaaatctcaagtgtcctagcatagctaaacaaatggaagatatggttatatgtcctcctccttttcccatagcatttacattcttccataaccatttatgcttcttatctattttaggaatggcacctttataagtaagtgaaagatgagagactggaaagtccatactttgaattaactcttctcttccatgaacgtaatgctttacttcctaccacattttggagaacttagcactacccttttttatagaacatctttactctctctttatttaatgactaccactggtattttttaatatgtaaattcaatagtttttctttttccttttttagtggtacaggtaatagaagaatagaaaaagagagttgagggagggacaagaactactttgaaattagagaatacatttacagcctcatatgttcagttcatttttatatatatagttctgggatatttttggaataattatgattttctgagaatcatgctgacagaaaacatcgtctctttcttttaagatgttacatttcaaggtacccccttatgtttgcagtagtcatacttccggaatctgggggacaatttcaatttttttaaaagatactctgccccaacataagatcatgggccattgaattcaggctgagttttattttttgatagctttattcatgattactgttatatataaagccaaatatagcatgaatcatacatggttagcttttcactctaattctcattagtacttatttgttgaatgtctgaatctaaaaagggaatgtgctaatagaatattactcaatatccatataaaacttaaatatctatacaaatacagtttctttaaccaagcaaatgattaatgtttaggagcatagttcatctcaaaatgctctgctctgatagagattcaagaatacttgatttcttgggagcctacatgtgatctaaaatgaaggcaggggaatggaataattctgatttaaatgtagttgtaagaatagtttggcagtacatatcttgattgaacttgatagaactgtcatttattatgggagcctgttgtctaggtcttactcatttatgcctagtgtattgttagtaatctgtgtaggagtgttaaatataaaggaaagaaattataagtatagaatgcatttattctttatgttaatgaatctatttgaaatattttgtggaatcttaaatgtgaagggtaattgtttatttgattacagagaaggaaaacctatacaatttattggctatttttttttttttttttttgagacggagtctcgctctgtcgcccaggctggagtgcagtgccgtgatctcggctcactgcaagctccacctcctggattcacgccattctcctgcctcagcctcccaagtagctgggactacaggcgcccgccaccatgcccggctaatttttttgtatttttagtagagacgggttttcaccgtgttagccaggatggtctcgatctcctgacctcgtgatccgcctgcctcagcctcccaaagtgctgggattacaggcgtgagctattggctatttttaatgtaaaactttgaaattgtattcagctatggagaaattctactagagagcttatggatgaaatcatagcatcagtagttgaattaatgtgggatatatttctcatgcatttccacctttaattatgaaaacacctggagctcagggaaggtaaggaacctgcacaacatcacacagcttctaaatggccaagatagagtcaaacctgagtttccctgatttggagaaattgtactattcaacactgattatggttgtatagtctttagcagatgcaagtcatatatattctttttttccttgcatataatatctattgaaaaaccgggtaggtgagaaaactttattatatcactaagaatgacagcatattgtgaaaatactgtcagaataccatcagtcaagtgtgtctgtcctttcatttaaaagtggctttgtctaatggcaggcagcatggcacaataagtagccatgaggagttcaggcagagatgcataaatgggtgactgtgagtattctaagaaatctactggacatgatttttttgtctctatatgggatctggaaattctgccagagaggcatttgagtgatgccttcaagagtaacccatggctgggcatggtggctcacgcctgtaatcccagcacactgggaggccaaggtgggcgtatcacctgaggttaggagtttgaagccagcctggccaacatggtgaaaccctgtctctactaaaaatacaaaaattagctgggcatggtggtgtgcgcctgtaatcccagctactcaggaggctgaggcaagagaatcacttgaaccgggaggcagaggccatagtgagctgaaatcatgccactgcactccagcctgggtaatccatagggcttttctcaggaatgcgaaggtggtttgatgttacaaagctattattgtgacttactgtgtaacgctcatctccatagagggagaaaaggcatttgataaaattcattgcttttttaattaagtaaacaccccatatttatggggtatatgtgatattttggtacatgtattaaagttcattgttttttctccttgggaggttgaggtgggaggattgcttgagcccaggagttttgaagttacagtgagctgtgattgtgccgcagctttccagcttaggtgacagagtgagactctgtctcataaaaagaaaagaaaggccgagtgtggcggctcacacctgtaatcacagcgctttgggagggtgaggcaggaggattgcttgagcccaggagtttgagaccagcctgggcaacatgaaaccttgcctctaaaaaaaaaatttttttttaattagccagatgtgatggcatgtgcctgtggtctcaactactcgggaggttgaggcgagaggattgctcgagtccagaagtttaaggctgtggtgaaccatgatcataccagtgcactctagtctggggcacagagtgagaccctgtcataaacaaaaaaattattgcttattgataaaaggttagtaaaccaggaataaaagggaacttcctaaatctgtttaaggatacgtatcagaagctttcatcaaggatattactgatgaaactttggaagcattctctttagtccaggcgtggtggctcatgcctgtaatcccagcactttgggaggctgaggcaggtagatcacttgaggtcaggaattcaagaccagcctggcaaacatggtgaaaccccatctctaccaaaattataaaaaataagctgggcgtggtggcgtgcacctgtagttccagctagttgggaggctgaggcaggagaattgcttgaacccaagaggcagaggttgcagtgagccaagatcatgccactgcactccagcctgatgacagagcgagactccgtctcaaagtaaaaaaaaaaaaaagaaaaaaacattctctttaaaatcatgcaagggccaggcacaatggctcacgcctgtaatcccagcattttggaaggccaagacgagtggatcactgaaggtcgggagttcgagaccagcatggccaacgtggtgaaaccccatctctaccaaaatacaaaattttgccagctgtggtggcgagcgcctgtaatctcagccactcgagaggtcgagaaaggagaatcggttgcacctgggagactgaggttgcagtgagccaaaatcacgccactgcactccagcctgggtgacacagtaagactctgtcttgaaaaaaaaaaaaaaaaaaaagaatgagacaggaaaccatttttcaccatttaataaacgttgtactgaaaatactagccaatattaggccgggcgcggtggctcacgcctgtaatcccaacactttggaggttgaggtgggtggattacttgaggtcaggagttcgagaccagcctggccaacatggtgaaaccctgtctctactagaaataaaaaaattagccaggcatggtcatgcgtgcctgtaatcccagctactcaggaggccgaggcaggagaattgctggaacctgaaggcagaggttgcagtgagctgagatcacgctgctgcactgcagcttagacaatagaacgagtcttcatctccaagaaaatactagccaacattataaaggaataaataaagctgtcattgtttgcggaagtctatgtagaaaactcaagagaatgtgcagaaaatcttttagaattaatagagttcaccaaaattggtggatataaaattaacatacaagtgcagcatcaaagaggaaatgtaatgttaaaaaagataccaatgataatagaaaccaaaatgtcaggtactgcggaatcaatattatgaaatatgcatataactttagagaaaagtaactgatattttagcagaccccaataaagatatatttacatataggaaaaaaaagtggccctgtctatagacaatgctaacaatatagctatttaagaaaatcatatggacacggggaggggaacaacacacactggggcctgtctgggggccaggtgaagggagagcatcaggataaatagctaatgcatctgggacttaatgcctaggtgatgggttggttggtagatgcagcaaaccaccatggcatgcatttacctgtgtaacaaacctgcacatactgcatgtgtatcctggaacttaaagtaaaataaaatttttttaaaaagaaaattatttatttagaaaggatacttcctctttttaaataaaagttttctagaacagtaattcttcgtaattttttcctcagcaacataccacactcccatgactgttaagaagtttgaaattcgttcagttgagaattgctgaggaatgcattttatgtctgcttcatttatgtagatacttttgacaaagaaaatattttagaatttagaaagaattcttgatagtaacagaaattggtttttgaaaacagtattttagtggtattaagacctataatcatctcctcttctaagttgataaaaacctttacattagcaacctggaataataatgaccagattaacacagtcattgcataccggccctaatgtaccatgatcagcttacaagcacgcatctatagacaactggcccatcacaacatcttggcaaattgattgccttggaggattttggaatgtattggcataaatgccagactgtgaaagaatgattgaaccacatggggttgaattcatcaatagcagcagtccattctttcaagcagaacatgtgccaagcaccagcttgtaatcacaaacatcatctgctgcatattgaagaggaaaacagcgtgggtgtgctcaggatcttggtggtagtttctaattaatcacaacattgtttagcaacttggagtatactcaaattgcttcatccatgagttctcaatccccatacttgctctggtgtttctctttttttctcttctttccttcttttattccttatattcatcaaggaaatatttactgaatgtcctctatttacatgatcctgaactaagcacaatgggaagtaaaatgataaaatgagcaaagcctgaactacacacccgacataatccagcacagagatcataattcactatggaacagagatcagggacctagtccccaaaacaaattagccaggagtgagagcctggtccagtccttcagaattgcaaggatgggatcccaagcagaaggaacattgtaagagacaaaattgtaacaatatgggacttctttgagtaaaacagattacccaaaaattgctgaagcattgcctattagaggagaagtagtatgaaacaaatcttctcaggtgggctggggcaggagtgtccccttcatgaaacaggccctgatggttctgttatcaatggttttgaacaagtaagtggaggattcagtggggtgctttagccaacaggtggcagcaatgtggaggcgggatggattggattcggtagagactggggatgttgagaccacatattaggcttcttattgaacacatgaatagtatgtgccaggaaccttattatctctaatcctcaaatggatagtactactcttaaatccattttactgaaggggcgatggagacttacagaatctcacagtggctacattgtaggactggtatgttaacactggtctgtgtgaacactttccacagccgtgcactgtcccactgggagatggatgccagccagacaggcagtagaaaggtggggaggcagagaggtacaggtgcagaacagaagaaatctttccaatgttttgtggaaagaagttaggcatacatacattaattctgattaaaacttggcaatgtattagattcaggatatatgaagagagaaggagcactcaaaagccatgaatcttgatttactttgaaattagataacatggggtaaaaaacaagtttggggtgagaaatgaggacttctgttttgtatgtacctgagtggcatacctcttgtgggtccttccttatgccttaatctcataatactgtatatgtacctctgttagagcacttacaccattgtggcatagcttgttttgttttggtggatgaccccatcctggtattatgagctcctcaggggctgggcctcctcacgtttctgtccctagcatggagtaggctcatgggaagcgcttcaggtatgataaggaactaggggattcttggccagagagacaggagaaatcaatggaagtccaaggaggaggaatgcttaaagtgaatgttgtgagaacatgattgggagccagttagagatgagtgaaaggctcccctgatagcacgcaggacctgacatgctgaatttgtcccaaaatgagtgtggctcgtttttgtaattattctcaaacaatgctcaactccctggatgtgggaatggagaactccctggatgtgggaatgaaatgagtggcttgaagtagataaatctggaactgaggctggatagagtggcaggtgggaccatgaaaatgatgaagaaaatgaaatggaggaattgcagtcgtaaggagcacagagtatgtttgttactatagcttggaagtgtttcagttttgttttgtgttacttctactgttcataagttgttgattttttatgctaagaaaaataagcttatttaagtgggcatacaaaatatcttggcatttgtggcatgaacaagatgtcggcccaagttctctctctaaacacttactagtttgtgaccttggaagagttatctaatccttctgtgtttagtttcctcttttctaagatgggggtagcaacacttggtctctctgacttcacaggactctgatgatgataggaaattgttcataaggcaggaagggttattgaagtattagataatccattgagatttgagcaaatgcttaatactcttggtgattgtgtgagaatggccgcctctggttgcattcaggaaaggatcgtggtgttgggggatcttgctgtgcttgattgtagcccaattatagggccctaaattgaggagtggggagaataatatttgaagctgagcagtgattatcttgctcccagtgaggcccctgctttctccacaggggcatctttactttatcagcagtggggaagcctcctacagtttgcatcttgtaatccattagtcacaaagtgttccactttttcctccttaactttaatattaatacaaggtaaaactcataaataaataaaacaaaaagaaagggaagaataagagcaagaaaaaccttgaagaggtgttaagggggcttcatcattggcagttctctttcagcagtctcacagcagacttcattacttcagtttgatcaaacattgttgtttctaataacccccttgtgttcttacttaagggaatatcatgctctttgaatattgaattttttttcttatccagttcaccatgtcagccttcctgacatctaaagtctctagattattggtgaagctttttcttacttttgttgttgatttttagcagctctattgaggaataatttacatacaataaaaagcatgtatttaaagcatataatttgagacgctggcatatgtgaacaccatgaaaccattaccacaaccatgcaagtgaacatattgctgcctccccagaacttcccttggtgcccctttgtaattcctccctccacaggcaaccattgatctgctttctgtcaagttatttggacttagagttttctttgggggaacgtttttaacaaattcagtatttttaatagcttatagggctggctactcaggctatttcttcttgagtgagtttggaagattgtatcttttagggaatttgtctgttgcattgaagatgctgaatttaatggcataaagttgttcatgatactcttattattttaatatctgtcctgagttcacctcatttactcctgatattggtcatttgtgtttctggctttttcctggatagtctgtgcatttgttttctgtggttactataatagattactacaaatttggtagcttaacgcagtagacatttattttctcacagttgtggtggccaggtgtccactcctgtcccacaccccctccagagtccgtagaggacaacctcttccttcctttttccagcttctgggggcacctgtcattccttggcttttggctgcgtaggtccaatctctgcatttgtcttctctgcttttgtctcgaatcttcctcagcctcctcctgataaggatacatgtgattgcatttagggaaaacctggatgatctaggattgtcttccgatcgcaaaatttttaacttaattatacctacaaagtttatttttgacatctaagataatacaggtttcagggattaggatgtgaatatgttttgaggggcccttatttagcctaccatagcttggcatgaagcttatcaattttattggtcttaaaaaaacaattttggttttatggatttttctcaactctcttcttttctacttcatggatttccattttgatctttagtaatacttttagcgtgtgcatactttgggtttcactcgtctgtctttttctggtttcttaaggttgaaggtttcctaagagatttcttgcagtaattttacctgttacactttagctccattccacaaatttttataggctatgtgtttagattctttcagctttatattcttactaattttcatagaaatgtgttatttagtttccaatttgggggatgttttccagttgtctttcagttactgatttctatgttaatttcattatggtcaggatattcttaatatgacttgaatccttttaaatgagttgagactagtttagagctcagaatataatctacctcaggtaaatattctaagacattgaccatacaatttaagaatgcatatcctgctcttatttggtggaatgtggtttaaatgtcacttattaggtcaagtttgttgatagtgttcttggagtcttctatatccttggtgaatttcaggatacttgttctgtcggttactgagagtgatgaaatatgagagtacaattgtaggtttttcaatttcccttttctgttgtgtcagtttttctttcaagtattaatattttgaagctctcagtaagtgcatacacgtttaggattgttatattctcttgatgaattggtcccgttatctttacaaattgtattttcctgcctttgtgcattcttagttattttttattttatgtccacattataaaattttatctcattgagttttgttctcggataccattaagctgcttagaagcagttgagtcttgcttttatgctgttttagatggcattcaagtaatgtttaatctaggactaaacttacaccattattaaggtatatcccttctaaatactcttttgtatgcttcagatttttcactctggttcgtaggaacaggcactatccccagccctgtttgagctcctggaattgatttctctaaccctttccagtagctctttcccctgtcttgggttgtttcctcacacacctacactgatcagtactcaactgaatactcaagggaaattctgaagatctccagattctcctcctccctctctgaatctatcctccctgggtcctctgccatctgaattctagcccccttggcatctctgtattctgagctgcatcttttcaactcaaggaaacaccaatgtctgcctggtttacctgccctgtgctgcagcctggaaacttttttgagatattgagctggggacagttacagggttcgcctcatttgtttcccaaatctcaggtatcactttgcttcattgcctgttatccgctagcatgagaactgttgtttcatgcatttttgcatggctttctagttgattcatgtagaaagggaaagctgatagccattattctgtcttagctggaaatgaaagtcaagagctggaattttatacaaactggcttttagtgcatttttaatcatacttagaaaaccttctgtaggctaggttcacagacaacctatcatccacaaaagtggctgcccttgtgggactctttttcatccctgctgctggagcctctgccacctggacaaccttatgcaagttacttagcaacttggtagtatgaggtgttcagagtgaaggaagagggatgagctcattttgggatcttgaatctactgctttactatgggttatattttaggtcttttatttctaatctagttggttaaaggttttagtttttataatgtgagaatttctgtgtttgaaagataaacatttaaaataaaattaaatgtgaaatgtttgtatgcacaaaacatttttaattacaaaagcaaaagaaatgttttaagtagagcatgacattttaaatgttcacttatgaacattcagccaattaatgtacttgatttttttcttctgcctcatagattctgtgatataaagattaatgatggttttcatttgtaaaggaagttttactgcctaataaagctaggttcataattttaatgaaaggaaattctttaattttgtttatgcataatcagatgtgcagctgctgggaccaaaatttatccattaaaaaatgcagtctaataaaggaactaccatcatttatttttaacaggaaatccaaatcaagagaaaatataaaatccagattttaaaaaactaggaaatatgtgatgtttatgcaatagcttatctcttgtttttatggcaagtcaaactttggtcctaatttgtcataatgttctgtatttctgttctccaaaatcattattacctagcctgaccatcaaatcatgatacagtttaatagtgaaagtagatgcatctttccaaagattataatagacttcttgcattaggaaaaactaatttctcatctgagaaagggcttttgtttgtttttgttttgttgtctttttttaaaaaaaaaatcatgatatacaaggtaaatgttattatttttatttgaaagttttgattaaaggaaaggtagtgccttgcttattttgtgggtcacttgcaggtatctgtatttgcagatgagcctgcctatctttcaggttgctgatccagatatatttcagcattgttacaatcaaactctcaaaattcacctgtttcacacagtctttctgatatattaggctttaatactgctttgctcgaatctaaggcaatttgacatttataataccctcagtctgctttctaaatggatcgtcactacatttagctttgaatgaccatcaacgcttctctaaattaatctattccctctcttgccatttagaaacaaaatcatttgcaataactcaagttttatgattatacttatatccatgtaggaatagaatattctcacccctataatatttcattctaattaatgccctggcttgacgtcccatactaacttttattgctgagacaacatacatattgtattccatttttgtgaatttgaatattagattttcaaaagatcctgaaatagttagacttctttggattttaatttaccggacttggtttagagttcattaacaaaacttggactctaattaagcagttagcattgcagtgatcccaggccatctcttctaacagcgggaataccataggtcctgggagttgactctagctccattaaggacaccatatagaatgcctcttaaagctaaggtgacattgtaactgaaacacttatgaggctggaagggccacatttagtaattatgccctgacaacaggcatcaataaggttagtcaacctacttaaggactcagtggttcagatttacagctttccagaactgatccagagttcagataaagaccaaagtatctctgccattttgaaagttcatttgtattttaaaataatcattgattgcctcttaagggactattcaaaatttagaaatacacacacacacacacgtacacacacatacacacatctatagataataggtattaattgtttttctttattaactttttggtaacttttattaataatctccattgtagctataaccaaggctgacatcatgcccaaattctgtaactttagtaaaataacatgaattttgttctttaattcttcttaatgaatgcttttcttacggttgattaaagcaattttgccagtgacttttaagtagtcccacatggatggattttaaataatacttaattgacaagaaagttgaagaacaaaggaagtggttaatctctagagcttgtagggatttaaggaagactaatttgacagttttagttatataggtcttctagtacccataaattgcttaaacttaaattatctcttgtcgcttttacagttcaaactaaaaacaaaaacaaaaacactatctgtttgcaaaataaaatattgtacccagatttctgtaaaaatagagttgttctgatttaaaatgcccagtcatgttgatttcatgaagatttaggaaaatttgtcctattgggaataattactatgagagctaaaaataatagttgtattttttttttctttctttcttaaaaaagctggacctgtgatctgcagaatgctgagttatcccccaactcgccgagctttaattgtgggttgtggcctacaaatgttccagcagctctcaggcattaacaccatcatgtatgtatttctttctggctttttactgaaaagattgtgaaaggattattttatgtgaaatagtgaaaagtatttcatgtaaatactagactcagtgatttgttctgattaaatgtatgaattctccttttgggagatactgactttacaattttttaattccagtaatttgttactagataaaggtgatttattttgtttgttatatgattggctttatttgattccataaaatttctcttttacgccatccaatacctccttgtattctgagcttaaatgtgtcattttttctaagccatttcttgatgctggttggaaagcaaaatagaaggaaatcacctggcattgccagagattatgggcacacagataactaattcatttctttttggtgcagtctactacagtgcaatgtgataaggacattagtagaagtacgtttattataaccagagtatggtagaggggagattgagtgggaaggagagtgaggaatacagaaaaattccctgttctctaattttaagagtaattcccaaagctgtatgtgtgctgagggtgggaaggactaaatattaagggctctactaggtttccctcattcagtattaaacccatttttgagggcctctgttgcactagacctacagcagtaactaaaatagacctgggtcttgtcctcatggatgtacaggctggtagaggaagcacacattaaataaactcacagttaaatataagatttcaaactatgataagggccatacaggactctctcaattctctacagagtagacttttaagatcctaaatcataaaatacagtttagagaaggttatgtgctttcccagggcacatattgttagattaaaagctgccacatcttagaagtcctccccactccctgcctattgattgaatttttttcattaagaaaatacaaattatgtaaaattaaattttctttggtaaaccatttgtatttgagactcttgattttttttaattacttgagatatgatgagttatttagtgactgtttgagaagagtgaattgattaaaatatttttaaaaaagaaggattaggacccaatgagccagtatattaaatcaagatttgttgagaaactccattttctatacattcacacactttgtggatttgactttaatcataatccctgttgaacttcaactttcgagactacatgttcaatattttgttctctcctgcttctctctgacattaactttcattttttctcacctttaccagctctattaaggcccatctgttggtctagtgccaggcacgtttgattgcttgttctctgaatttggcacatcatgacttgttctgagatgtgtccaccttctgcagtctggtggaagtatagaattgcagctaggctaggaccaagcatcaaataattaaatccattaataatcctatgtgaattcgttagttgaccaacctaatatttgttctggttttgaaaatatgttttgtttgttatgctttttttcctaagcatttaaacttgacaagtataaaagcatagaaagtgaaggatttttcttgtactttttttgttttcacttaaaactggtatcacaaacagagccaactctagtttatgggtagtgactggggccagtgtattcctagtttgaaatgactgtcataatccattagcagtagctagtgtaaattgagctgattgatgctgtcaaattttaataaaacattcatttctccaaagcctcacttttttcctgaagatcaagtgatataaggatcctgatattctctaatatttatgatagatgcactttgcttatcataaactgcacatgatataggtagtgttgtcatagagcttttgtttgcatttgattatcaatcctggaaaacaggaagaataaaataaagtaaatgatggctgaacttagactgtgtctacatgatgtaaaacagctaatcaacttcctgcataaattaatatgttcatgtctagaggttaaaggattagacattaaaataatacaatacctatgctgagtaactgttgtttattcacagtacataatttcagacattcatattataagcccataaaatttagtgtaagtcagtgtcattatgatacactgtaatactgtttactgtctgcataaaaaacaactaatctgggactctcatgtaatgtgttttctcctgctctctctagtctttatttgtgtgtgtatatgtatgtatctttttccattattctcaagattaaggaaatactatcataaactttgtttctgatttaaaataatctattagagtctagtaatttactttttttatttttagtagaaattttaattatgccttttattttgtgttactttgttaattcagaatatcttttctatggatattttattacatataacacatatgtttatgtatataaaattttactctttttttccagcttcttcccttttaagtgggaaataaagcagttaatgcttttctttattttaattcaaccctaataatgtgtagaagttgaaatacgtttttgaaaattctgtcgtttacctcaaaatctgagtgaatggaaatataaggtattttgaattctatttctcaccaaggtgagtttatagaaagattatacggaaagataatattaaacaaatacattaaaagataaatcatcctcacagttgtgttatataatcttactgtgtttagttttttatcttctccctcaaagaatcctttattcctattcccttgacctatttactattctgtcacatttgacaaaatagattttcttcttgaaatacttgattttcttttcctttaccatatttatctatagacagtatatcatatatatagatatatatcttttatttgtatgataacttatgtttctttatatcccaacccatacattctcatcctctaccctaccgaatggaggacttgtaagttcttaaaacttacatatttcagacattacatttcacttttagatgaggcaatttttttttataatatgactctcatcctaataatttcaacatgcaactgaattgattattttcctttattcataggagagaaagagtagagaaaatggagtactaactttcctaatataagggtgttagtatcattgcactgtatctcatagaccaataaaatatttctgcatgtgtcaaaataaagaagaggagtgatagatgaagatgatgatggttaaagtaaattcaagaaattctcggccaggcgcggtggctcatgcctgtaattccagcactttgggaggccgaggtgggcagatcatgaagtcaggagatcgagaccatcctggctaacacagtgaaaccctgtttctactaaaaatacacaaaattagctgggcatagtggcgggcgcctgtagtcccagctactcgggaggctgaggcaggagaatggcgtgaacccgtgaggcagagcttgaagtgagccgagatcatgccattgcactccagcctgggcgactgagcgacactccgtctcaaaaaaaaaaaaaaaaaaaagaaattctcactgtgatctattctaaactctagttataatatcaaagatgttccatgttcaatctaagaaatatttatctgatgactattaataaatagacacttcccacattatcattaccacaacctaaatacatgtgttcatgtttggaggaggaaaggtgtacgtaggtagtgagaaagaaaacactaagttctatgtgggtttgataacatctttcttttttggggaacttgaagtaaactatattttggtatattctgataagcagataatcagtctgtcttggatgaatgaaaggtatcagatttttacctaagaagaccaagtggttaaatgactctcttttaaggttacacagaaaaacagtagtaaagggggaaagaaaatccagagtttaagcttttgagtttgcttcggataaagagaactgtgggggaatcttctctggggcatttggtcttttactttttagccactctccttgcagagtaatattgccagctttatttcctcttcttacttttctgtcttctattaactcagagtaatagaagctgagtcaagttagagagctgagtcaagttagacaggcaagtgaaataagcgggtagaggaagcagcagaaaggccctgggagcttgctggatcccaagcagcccattcctgcctggcaccacagtgatccatcaggagagtggccagaggagcagggggtaaaagtccacagggagaagaaattctgtagctgaacttggtaacaatttgaatggggcaagaagcctcctggccataagggaggacgcaaatggggcgttcatacttcacaggccgggggaaaaactaaagcccttttctttcacaactgggaggcggacagccttgggcaaattttcaagcccatctcgccctccgcctggaaacagacttggggctgttgcgggaacatggtgggagtgagaccggctcttccgtttgcgtgagagttgggtgaggcctgtgactgccagctttcacccacttccctgacaatctgcatgactcagcagagggagccataatcctcctaggtacacaactccaatgacctgggaatctcaccctcaacccccacagcagccacagcaagacccgcccaaggagagtttgagctcagacatgcctagtctcgcccctacttcatggtcctttcctatccatcctggtagtggaagacaaaggacatataatcttgggagttctagggctctgcccactgccagtccctctccacactactacagctgatgctttctggaaagttccacctaatggcaggaagccaaccagcacaaaaatagagcgttaaaccaccaaaattaagaaccctcatggggtccattgcaacctgctccccacaacctccactggaacaggcgctggtatccactgctgagagacccataggcggttcacatcacaggactctgtgtagacaacctgcaataccagcctggagccaggtagactcgctgcgtggctagacccagaagagagacaacaaacactgcagttcagctcataggaagccacatccataggaaaagggggagagtattacatcaagggaacaccctgtgggacaaaagaatctgaacgacagccttcagccctagaccttccctctgactgatcctacccaaataagaaggaaccagaaggccaaccatggctatatgacaaaacaaggctcttcaacacccccccacaaaaaatcacgctaattcaccagcagtggatgcaaaccaagaagaaatccctgatttacctgaaaaataattcaggaggttagttattaagctaatcagggagggaccagagaagagcaaagcccactgcaaggaaatccaaaaaatgatacaagaagtgaagggagaaatattcatgggaatagatagcttaaagaaaaacaataaaaaattcaggaaactttggacacacttttagaaatgcaaaatgctctgggaagtgtcagaaacagaattgaacaagtagaagaaagaaattcagagctcaatgacatggtctttgaattaatccaatccaacaaagacaaagaaaaaaaataagaaaatatgaacaaagcctataagaagtctgggattatgttaaatgaccaaacctaagaataatcggcatagctgagaagagaattctaaaagcctggaaaacatatttgggggaataatcgaggaaaacttccccagccttgctagagacctagacatccaaatacaagaggcacaaagaacacctggaaaattcatcacaaaaagaccttcacctaggcacattatcaggttacccaaagttaagatgaaggaaagaatcttaagagctgtgagacagaaacaccaggtaacctataaaagaaaacctatcagatgaacagcagatttctcagcagaaaccctaccagctagaaaggattgaggacccatcttcagcctcctcaaataaaattatcagccaagaattttgtttccagagaaactaagcatcatatatgaaggaaggatacagtcattttcagacaaacaaatgctgagagaatttgtcattaccaaaccaccactacaagaactgctaaacggagctctaaatcttgaaacaaatcctggaaacacctcaaaacagaaactctttaaagcaaaaatcacacagcacctataaaacaaaaatgcacattaaaaagaaaaaacagaaaacaaaaaccaaagtacccaggcaagaaagagcatgatgaaagcaacagtacctcacatttcaatacaaacattgaatgtaaatgacctaaatgctccacttaaaagatacagaactgcagaatgcataagaactcacagaccaactatctgccgctttcaggagactcacctaacacataaggacccacataaacttaaaggggtagaaaatggcatttcatgcaaatggacaccaaaagcaagcagggggtagctattcttatatcagacaaaacaaactttaaagcaatagcagttcaaagaaacaaagagggacagtatataatggtaaaaggccttgtccaacagtaaaatatcacaatcctaaacatgtgcacctaacactggagctccgaatttataaaacaattactaatagacctaagaaatgagatagacagcaacacaataatagtgggagacttcagtactccactgacagcactagacaggtcatcaagacaaaaagtcaacaaagaaacagtggatttaaactataccttggaacaaatggacttaacagatacatatagaacatttcatccaacaagtgcagaatgcacattctattcagcagcacatggaactgtctccaagatagagcatatgataggccataaaatgagcctcaataagtttaagaaaattaaaattatattaagcactctttcaaatcacagtggaataaaactggaaatcaactccaaaaggaactttcaaaaccatgcaaatacatggaaattaaataacctgctcctgaatgagcgttgggccaaaaatgacatcaacatggaaatttaaaaattcttcgaactgaatgataatgacacaacctatcaaaacctctgggttacagcaaaggtgatgctaagaggaaagttcatagccctaaatgcctacatcaaagtctgtcttgctggtgttacaggtgccactggggtgtgaaaaaaaactcctgcagctagctcagtgtctgcccaaacgtccacccagttttgtacttgaaacctagggtgctgatggtgtaggctcccaagggaatctcctggtctgcggtttgcaaagaccgtgggaaaagcatagtattggggccagaatgcactgtccttcatggcacagtccctcatggcttccctgctagggagccaagtggtctagctcagtggatcccaccccacggagcccagcaagctaagatccactggcttgaaattctcactgccagcacagcagtctgaaatcgacctgggatacttgagcttgctgggcggaggggcgtccaccattactgaggcttgaataggctgtttttccctcacagtgtaaacaaagctgcagggaagttccaactgggcagatcccaccacagctcagcaaagccactgtagccagactgcctctctagattccttctctctgggcagggcctctctgaaagaaaggcagcagccccagtcagggccttatagatcaaactcccgtcttcctggaacagagcccctgggagaaggggtggctgtgggcacagcttcagcagacttaaatattgctgcctgctggctctgaagagagcagctaatctcccagcacagcactcaaactctgctaagagacagactccttcctcaagtgggtccctgatccccatgcctcctgactgggagacacctcccagcaggggtcgacagacacctcatacaggagagctctggctggcatctggcaggtgcccctctgggacgaagcttccagaggaaggaacaggcagcagtctttgctgttccacagtctccgctggtgatacaggcagatggcctggagtggacctccagcaaactccggcagatctgcaggagaggggcctgactgttacaaggaaaactaacaaacagaaaggaatagcatcaacatcaacaaaaaggacatccacagagaaactccagctgaaggtcaccaacatcaaagaccagaggtagataaatccatgaagatgaggaaaaaccagcacaaaaaggctgaaaattccaaaaaccagaaaacctcatcttcaaaggatcacaactcctcaccagcaagggaacaaaactggactgagaatgagtttgatgaattgacagaagtagttttcagaaggtggataataacaaactcctccgagctaaaggagcatgttctcacccgatgcaaggaagctatgaaccttgaaaaaacgttagaggaaataattgctaacgagaataaccagaggaataattttcctctagaaagctctgagaactgataaaataattcagcaaagtttcctggtacaagattaatatacacaaatcagtagctcttctatacaccaacagcaaccaagcagagaatcaaatcaagaactcaaccccttctacaatagctgcaaaaaaatataaaatacttagaaatatacctaacaaaggggttgaaagacctctacagggaaaactacaaaacactactgaaagaagtcacagatgacacaaacaaatggaaacacatcccatgctcatggatgggtagaatcaatattgtgaacatgaccatactgccaaaagcagtctacagatttaatacaatccccatcagactaccaccatcattcttcacagaattagaaaaaaacagttctaaaattcatatggaaccaaaaaagagcccacatagccaaagcaagactaagcaaaaagaacaaatctggaggcatcacactacctgatttcaaactatactgtaaggccatagtcaccaaaacagcatggtactggtataaaaataggcacataaccaatggaacagaatagagaacccagaaataaacccaaatccttaaggccaactgatcttcgacaatgcaaacaaaaacataaagtggagaaaggacatccttttcaacagatggtgttgggatgattggctagccacatgtaggagaatgaaactggatcctcatctctcaccttatgaaaaatcaactcaaaatggattaaggacttaaacccaagacctgaaactataaaaattctagaagataacattggaagaaacccttcaagacactggcttaggcaaggatttcatgaccaagaacacaaaagcaaatgcaataaaaacaaagataaataattgggacctcccacagagtgggagaaaatcttcacaatctatacatctgacaaaggactaatatccagaatccacaatgaactcaaacaaatcagtaagaaaaaaacaatcccatcaaaaagtaggctcaggacatgaatagacaattctcaacaggatatatagaaatggccaacaaacatgaaaaaatgctcaacatcactaatgatcagggaagtgcaaatcaaaaccacaatgcaataccaccttactcctgtaggaatggccatgatcaaaaaatcaaaaaacagtggatgttggcatggatgtggtcaacagggagcacttctacactgctggtgggaatgtaaactagtacagctactatggaaaacagcgtggagattccttaaagaactagaagtagaactaccatttgatccagcaatcccactactaggtatctacccagaggaaaataagtcattattcgaaaaagatacttgcacacgcatgtttatagcagcacaattcacaattgcaaagtcatgggaccaacccaaatgcccatcaatcaacaagtggataaagaaactgattcatatatatatatatatatatatatgatggaatactatgcagctataaaaaggaatgaatcatatatatatgatggaatactatgcagctataaaaaggaattaattaacagcatttgcactgacctagatgagattggagactattattctaagtgatgtaacagcaatggaaaaccaaacatcatatgttctcactgatatgggggagctaagctatgaggacgcaaaggtgtaagaatgatacagtggactttggggacttgagggggaagagtgggatgggggtgagggataagagactacaaatatggtgcagtatatactgcttgggtgatgggtgcaccaaaatctcacaaatcaccactaaagaagttactcatgtagccaaataccacctgtaccccaataatgtatagaaaaacgaataaataaaatattataagtttatatattttaaataaacaacctaaaatggctttttgtgtgctaaaaaaaaatcacagccatctcaagaaccattaacctcatcaggttcttaagttttctggtacctagctaagttctttgatttatatcctgatctagagttcctggacaagctaggctgatggttgaatgagtcattcatacttgttaatcatatttaatttaattttctaagtgcagtatttctggatctgttccattctcatattctatcctcaacaagcacagctggtattaaaaaaaaaaattaccacgcaatcaggaaacatagcacaagcacacatggtcagatggtgataaatgtagagaagaataaaggtggcaggaaataagaaataaaacaataagggtttgtacactttcaggttgtaaatctgaaccaggaatggggttttactctctgaggtcttccacaatgcaggatgaatgtattagagcagcatctctctaaagtgtcttcccctctctgcctccctagtccaaaaagctgttgaaagataaaatgtttactcatcgaagtatttccagattagtgaattgtactcattcgtgttcattggctggaagttagtgaattaatgggaaaatgttaggatttatggctcactcttttgaaaaatgagtgtcatgtgaggggaagaatattaacccaggaatcaggaaaattagattcaaggtctgtctccaccatgggactctgggcatgccagttaattgctttcagtctaattacctataaagtgaagtagatggacttttaatgtgcatttgaatgaggacaaatggagtttcatggagtttcaagtagaatggaagctaaaacgtttgaaatagtaatactttaagcctttcttggatgaaaagttatcagactgtagaaaaatagttttggcctaaaaagaaaattgtactttgttcaacaaaatttttggaatatttattaaatgcttaccacatgctgatcattgtcttagaggcctagcttcttatatgttaagaccatatttttatttcccaatcatgtctttgaagaaagacaatctaggttatggctgataatgcctctttatcccaagattgtgtagcagacttatcacctgatgtgatagactttccttggctcccataatgtaggagtaggctcaagccctatgaactccactggcttctcagctcatgtgcacacggtttataagggaaagggtgtactttctccctctggagtctaaaaccctttttgatggcaggtaggtaactcactatcctagcaaacaaaacaaagcattctcatcagaggaggcttggagcagaatgcctttatagcgagctatcagaatgtttctaatcattttccatttccctgtgtatatattgcatacctgtctctgtttaggttgccccaaaaccaggccctaagacaaggacttgggtgcagatgatattttggggacgatatcaagaggatgagaaaaggagtaagggaagtggaatagagaaggaagaagaggcagtaaagagagcattggtaagcaggctatgtcagtaggcaactggagcacagtcctgctgagtactctccaaggaacagtgtagattgtcctcagaattagtccaggggtatttatccacaatccccattccctcaacttgagtgttgaccctgcggatgttaaatgcacttcctccaggctttcctgagaaatcacttatggtgccagagctgtcatgtagacaagtagagagacaaagaaagttgagctagaaactgtcagattctatagtgagtttccatgatggctgcagggtaattcagagggtgatctagagcatatggggcaaggcatgaaaagcacctctgaaaaatcctgtctccaaatatgtgtaaaaataagttagcacaatatggatgtgaactttcttagtactgttcatggatacagcaaatccatttttagtaaaaaaaaaaaaaaagtcaatgatccctggctaaccatgtggaaaataaccaataaaaattggagattcatgctaacaaatgatgaaaatatattttcttgaatattattatccttttttctttgtatgattcacaaataattttgtcctgttacaggaatctgaaaaatacatcattaatgtatgtatgtatttatgccttcaaccaatatttactgtatcattgctgtacattcaaatccctacctagggattgaaggggacacaaacaaatgatttttgttgtgtttttttttttaaagtttctttaaatggagttattttgtgtgcggaaacatggtacatcaaatattaatacaacctttggtgttagatctggatttgaatccaaacccaacacacctactctctgtgtaaactccacaagctacataataacttctcaggtcctcagtgatttggaaatcaggaattataatacctcccaaatgtgattacatgagaaagcatgtatgattgaggcccatgggagcaactacatctgtgttcactttccttctgctccctgtgtactgcagtttataaagtcccaggcgtttgtggaaagcagaaacatcccaccgttaatccaccttctttaccctctacccgtcgatacaggatttgaggcatcctctggagacacaaaattgctataatacccttcttttatgcatgtctctattttcaaaattcaggaaagaatcatgatggtgttcttctagcttgtacatgttatagtagtgcccttcacttcaatattagatatgttcttttcatcttagatttatgtcaaggagaaaagacctcgatgaccttaggatgataagatctaataaagcctccttagatggtgggggatctgtagctaaatatgcccaatgtggcgtgacttgtagtttacatcaaaagattgtcaaatccttttgtcatgcttcctgaatcagatgtgaatttaaggttctgtggtaattagtggaaattcatctccatggtttgtaaagtatcagcaactaaggtttcaggtgcctcaggacatctttagaaatatgaaaacatatttccttgccttcctttttctgaattatatatttcactgaaaggtaaggagaagaaatggaggtgctgttaatgagttgaaatagcatgaagtccagggatgtgtcccagaaaatagactttctgtgccaataaagcagaaccttgtccccaatatatctgagtttgaaggtaacaccagtctggctgattccgggtagactattgtaacattgtagaagtgcccaggtcttaattcactctttacacacacaggtagcaggcactctgccagggaccagagatacacaatatgacttacaccattttcagggaacttatggtctcttttgcttatctttaaaagcatatgctgtgacctgtcttgaaaggttgcttgaagatgaaataagacagcaaagtgccagccacaaaagatgtgaggaagttctattttcctcttcccagatttacatttattcttctctatgagttcactatccaggctctcatcacttggccatggttcttctgaaaaaattttccctcaccacagcatttcaacttaaatctccttcatggcttttcctactcaatttgaaccgtaatggtggtgctgtccaagtcttggcttgcaactctactcagagacctattccagtcccattaggccaatgaccatctacatgttaaagaagacctaatctgtagttgcaggtcagaactcctctgccatacacactcatatattcaactgctggacatttctacttttgaatattccactctcaccagtctcagtatgcctaaaactgaatccctatcactttctgccaattctgcccctccccttataatcctcttctcaatgatgcatgtggccagttggctgcccgagcctttagcttgagagtgaacacatccaaatccaatcagctgtaatttccttcaattttatatccctaatatctcttgtatccttcctatgatcttcattccattttctgtcaggccttgctttagtcagagctcatattatttgcaacagaatcccacttaaacctaactttaaaaagataagttggtgtacaataaggaaatagggcctaaaggcaggaaatatagctgggcctggcagagggttgaaatcagaaactagagagtcacttgctcagcttctgtgtgcccaaggttttttgctgttatttctgtagggtatatgcacccttcttctttctcttagagaacatcctcttctcttgcttgtatctggtcaatctctaccaccataactttggaggtacttctagttcaagcatccacaatagattggaattgtcacaattcttaattcccaaagagaaaaagatcaaagtgaacctaccctagcctgagcatttgagggcagggggcttgacaacactgtagagggatgcacagaggattttcctgccttaaatctcaacttcctcaattgagccttggttatctctgcctctaaactttctgcaacaaaatcaattatgtctcatcttgacataaatgatttaatgtgtcccacagctttcagcgaagttcaaagtccagggccctttgtggcttttgcccatctttgcactgcttcatgtccaaccactgccctacgcaagggtatataaagaagggtgtgtaaagctacaagtttcataacttctcagggcatcagtgatctggaaatcaggaattataattaggcacaaagatgagatgtataaggtataaaaaggtacatgtacctcctgctacatggaacctcctgtacttctggcaatgattaaagctaatccaagcttcagtgccttcatgtgtgccattctccctagctgaaatagctagcttaccctaaaagacttccaaacttaggtcacatgtcatctccctgaaccaaggggccaatgtaaatgttccccttctggcctcctttagcactctgagtggatatctatgaatagttatttattatattataactgcagatgtgtctatttcctccaaaagaccgtacacatactaaaaatgcccccttgcaatattccccagggagaaccagctagattttagttactactgactgttttgtttttattctgttcatatccagagtcatagcatgatgtataaggggaatgagtcactctctgatagtgtgagtcttccttaactagtctgcagacatgaccttaggaaaataaaagccacaacattcaagctttgagaagaggatctttcaaaaatgttgccaagttagtcctgacctttagaattagaattagtgacaggctataatgacatatctaatgatttataatattggataggttttcataattttatttatttatttatttttcccttcttgaggagaatggggtcttgctatgttgcccaggcaggtcttaaactcctgggctcaagctatcttcccacctctgccttcctaagtgttgggattgcaggcatgagccaccggtcccagccataaatttaatttggatttcaacactgaagatttccataaagtattcttcaagtcatatctctttctcttggttccttctttctgagggcaggtgaaaatctaagttagtcagttctgttcaaatttgtgattatgcttcctgtggctgatagaattgcaggatttcaaatgctattaagccgctccatgcagagacaaatagtctgatgacctgccattcatggcaggaagagaaatgaacagtgtttcttgctagaacttcttcatttatttcgataagatcatttcttactggacagattaaaccttagagaactacatataaggttctcctatttctatttttgaaaaaacactcagtaccagaaaatatagaaaatgtataaagtagatttaactgtgaaatttcaactttagtttccagcatagaattaacagcctcctcctggattcttccaatgatccctctgtaatgtccctaagtctctttcctcagctgcttatccaaaagtgtaatcatttatctaagactgtttgcaaggaccaaatttagtcctcaggcatgccttctttagaaagtgcagtttttacatttgttaaattacacattaaagtccacatttccagagatggcattgcctcttggagatgatgtaggtcctctcccgttccctgcattccctgctgctccacataacctggcctcatctatgcctttgaggttgtgccacctgtcctaaggaatcaacattcgattagcattctacttagaactttcaccatatatgtcctgttctgggctgggttgaaaagaaagctgacaattagagtggctctggttttaggaattgctagttgttatgtcaacagctatggacattcatagaatcttcagtttcattttttatccccaagaccttcatttcacattaaaagaattctttttgaggctgtgtgcacaaggctgctatttgccaccccttacaatccctttttatcaactaacagggagttaggtcatagctaacttaagattcagaatcagacagactatctaacaatattgctagaattaactgaaatatcatagttaatctactctaatgtgactaagtcatagaagcttattttttattattttatctggcattagacagacctggaatcaaatttcttgtttcctgaccacttgtgctaccttgagtaatttatacagacactctaagtctcaactttcttatttgtagatggcatgatacttttcagggttgtgttttttccccattcttacccatctcagtgagtgatactactatccctctagttgctcaggcctcaaatccaggattttggccaggaatctttgattctccttttatctgtactcctcatatctatttcttttgcaagtcttagcactaaagctatggttcctgaacggcctggagccacagggcacccttcacaggagaccacaggatattttaaattttcagacgaaataatgacatagatgtactactactgttaagtagtatgtaccttataaagtggaactgctaggtaatttagacctatgtgtgctatgaaaaaaattactgagacaccaagggcaccatgaagcaagaaagtatgggaacctctgctctattatttagcatgcatccttcctatatttatcttcatttcactgctgccatctgcccaagtcactgttgcctctcatcacttactgcaatagctggccttccaactggtcttcctgcatccatgctcatccttcataagccatgttccacagagcaactagaatgaactttgagaaatgtagataaggtcatagctttccttcacagtttattcttatttatttattgttaggcagggtcttgctctgtcgcccaggctggggtgcagtggtgccatctcagctgactgtaacctctgcctcccaggttcaactgattctcctgcctcagcctcctgaatagctgagattacaggcacatgcccccacgactggctaatttttgtattttttttggtagagacagggttccaccatgttggccaggctggtcttgaactcctgacctcaagtatccacccacctcagcctcccaaagtgctgggattacaggctccattacactttaaatcaacctggcttttcacatggtccacagactgtgcctgcttgtcccccatcttctccatcatcccacccccacctttatcccctggttcattaagacttaactgccccagcttttttctttcatgtttctcaaaatctccagatttgttctcaacttagaggcttttcagttgctttcccttctgctagaaagatcttcctctgtatctcattgtggctgcttccttgtcacttgcgtctgaatttaaacagcacacctcagataggccttgaccttgtttggaacagccacctttttccatcaatatcacatcaatccattttttcccgtcatgtttatcattgtctaaaattctgcttatttatttgtttattaagctccatgggtagagcccccatctgtactgttaacctttgaactgtctccagcacacagtaggcactcaaaaaatactggttgcatgagaaacgcagacaactgcttcatctatttcccttttttgtaaccagatgttgacgttgatgattgtgcttctgttgctccttttttatagtcaagtcttgctgaacttttaaaagatgaggaactaggtgtttaggggtcattttaagcattggatcatttattcatattgctttagtggtcaaaaaaagaagtgtactactattgtactgtactttatttgaagtgcctgattccccccaatccttagtaaactgattaaataactggaaaaaaatatccattttctatttcctactttactggagcaatatatagtaaaatcaaaatcaccctgtatactacttattccattaaaacaccaaactgaaagcagcatggaagaaaatgtgttgcaagagccttaaggtttattttttcaccttttctaggaaatgaataaactagattgccaagttatattgtgcaaggtctgttttcagtttggggagatgaaagaaaagaacagctacaagagtaacaaaataaaggtcttgaatgggcctcaataaaactatgatattaggataatatactattatataaaatgaattaaaattataatactattttagtaattagtataaaatcaaaacaactaaatttggatatttatttacaattttggatatttacattctgaccatttgttttgtgggagggtatttttttctttcattaggctttgcagagtccattcctaacgtactagttggcttaaatttaaaagttaaattggaatttacaagctcagttgaaattgggaatcattttccaatagtgtgtggcactttaagctggtaaacaaaatcctcttttgccttaccatatctgaaatataaaatcaatctgtcattactatcatagaacctcccaagttacaactctaagatttacagtgtattttctcccgaccccagcattcctatagcatcagctccagatgagagtagaataaaggaacacagatactcaggaggcccacgtgtctctgggtgcaggtgcaggtaggtgccagccactgctggcaggcgaatagggctgttggaaagggagtggcaacagcagaggcattggtaagggcagctagttgtggtaatgagagctctggtctcatttagtagcaggcattagtagtagtactcatttaatagcagggcatttgttttgcccttgataagggaagaaagaagtagacgatccttatagtggttctgacagcaactgttagggagggagggggcgcaagattgtttctctgtatcagtggttagtaagctgtatgtttggacatagtattatctctaatatgaatattttagttgacaattcaaatgatttctaaagtcagaaaaactgaaatgactggggcttctcagaatgaatcatacagaaattcagtatttattaacatatttattagaaggccaatttgtgaattaatttggttattaaaattatattgctcacttagtttgcatgtatataatgtgtaaaggaccagataaaaaatgttggtaagctatttattttaattgtagggtatgaatcaaattgcttgactgctttggagattgatctattaaagcacagtgaaatgagtttgcctaatttgctgattttaaggttttttcattaaacaataaatgatgttctgaagtcagaatatttatgtggcagtcacagtcttgttttaagggtattcatgtttttattttgaatttaatttttatcacagtattacatacacaaaagtcaagatactataaatcttactgtgaaaggcagttgtccctggccctccctttcccatctcaaattctgctttccagaggcaattacttgcacttcttttagatttttctttcagtattaacaactgtatttttaagtgaaaaatatgtataatttttgaaattctgcactgacttttcattatggaagatgaaatgcttcttccaacactgctcccccacaatacacacattcacattcacacattcttcctgcccctgatataattatatctcatttttggattaattaatatataccattttcattacgatgatgatggaaatattgttccccactgagcagctctgtgcactgtgattaaatttactctgatgtgtgctgtgagtcttctgtttgctcctctgcagcacttccccctcctccaccttgctgcctacaacccatgatcctggcctgctgaaatggctcatacagttataccaggatttttttctctctctcctatagtagtaagtaggtgccacattctttttcgttttttggtttttttttttttttgagacgaagtctcactctgtcacccaggctggagtgcagttgtgcaatctccacacactgcaacctctgcctcccgggttcaagcgattctcctgcctcagcctcctgagtacctgggattacaggcatgcaccaccatgcctggctaatttttgtatttttagtagagacagggtttcaccctgttggccaggctggtctcgaactcctgacctcaggtgatccgtcctcctcagcatcccaaagtgctgggattacaggcgtgagccaccacacccagcccaagtgccgcattctttaacttgctcagtgttcagtgtacccctcactaattctttctgcatacttttcagtggagctgtaaagcctcttcctttacagttaaacctaatgagaaacacccataatccatcctgtgattctgctcttcttacagaactttctcctgcagcctccagtatcctgcctgcctctcccatctggttgccccctgagggacagctgtagaaatgctctttacccctctctcttgtggctgagttctgtttcctatattacatgtcttttgctttttttttttgagatggactctcactctgtcgcccaggctggagtgcaatggctcgatctcggctcactgcaacctctgcctcccgggttcaagcgattctcctgcctcagcctcctgagtagctgggattacaggttcccaccaccacacctggctaatttttgtagttttagtagagacagggtttcaccatcttggccaggctagtctcgaactcctgacgtcgtgatccacccacctcagcctcccaaagtgctgggattatgggtgttagccactgcgcccagcctcccatgtcttctttttaggctgacttcatctttatcatgattcttactctgtactagtttcctgtgaaaagttcaatgagaagtaaacagttttgagaccatgaaactctttattcagtccccagacttgggttgtttttctccctcagaatttttaatgccataaattttcattttcttgccactccttgctgctggccttcaccatgtctgccatcctcctgtctgcaatcctggacattcattttctctggacaggacacctctgtctcctccccatgtgtggggagggcaaaggatcttggcagtggagttgggggaggcatcttgttgattgttacaaggattgtcaaccagtcctttttataatctactgtctgagatatttggtacctccaattcttaagactttccagagtctgtcatacaaatcatcctgcttcttgctggctttactttgttgtgattaggttttagttctgctgtgttaagccagtcaccacttgtctatcctctttccactgtccaaagcttccagtctgatgttctttatccttgcatacaaactttaattactttatagtcattttagtggagagtgtgaggaaataaagctgctgggtttaactgaacatctttcataagccatttaaaaatcttgagacaagaaacaggcaagtttgtaactgaaatgcttttctgaaataaaaatgttgcttattttttaaccagttacgcatttaatatccttaattttttaagattttaatgttttaactctgtgcagtagagcatctagcattttagctctattttctttattcctcatgttctaaaagaagcactcttgattccaccactcacacaaaaagtgcaatcagagcctgattggagggttggcaggctctcaaattgagtaagtacatttgcatattagaaggaacaggatttactttatagaattctctaatatgagtaagattaagatttttttcacccaatccagtaagcaacaattgggccaaagcataacttatattagtgctgtttgaagttaagatgttttgtttttttcaagagtatgggatgtgtagcgttttttgactattgaagtacaagatattattcaagtaaaacatttttcccttttcaaaataatgttgctataggaaagatttcgatgaagtaatgtaagtaacaactcttaaatatatatcaggactttaatatcggaaatgtaattcgtttcctgcaacatgaatacttcataccaagcttatagttatatagataatttaatttatactttaatgttttgggttccagtttatttgaagttaattcatttaattatttgtgttttgggtacttcatgggcatgtaccatttatcttaaatgctttccttccacaggagctcaataagtgttgatataaaaacaatcatgttgtgtatctctggcgtagtattttgaacattgtaaagcttaataaacttgtcaaattaattaaagcatatcctgtagcttttgtaaatgcctcttaaaataaaaatttctgaatatgaaataaaccagatttagccaagttactatatcattgcataaaaacttcttggttttgaaaagctgttttgacagtaacagtagcaaataaaatattttttctcgtttgatatgttattgtttaaaaaagataaattctaacctaatgtagaccacatataatgaacacgcaatttggagtattaaacattttattaattgtaatagattatgaaatcctgaactacttgtattgttacatatttagtattttatattttaaatgacatttgggggaaaaaaactcaagagtatgctttgactaatatgtttatattctttccaggaaacttcatatgactcaccaattttcagtttagtttttgatctctattctatacctagaaaattttaaattccttaagtattttggtgtcaggaatcaaaggtagaagcaaacttgcagaggttgattctcccaggttctataaaatgtacaaaatgtagtggatcatttcataaaaggaatgggtgtggactcaaaagcaccaggccatttgattatgatacatgaactgtagacatatggctgacaagaatcttatctgtttaaaatacttagtgcaaagtgtattactgttccatttatatatgatcaaactaaatgctttagttctggaggtactataaattatatgatacattgatggattgctttatcaattgtccagcttttctcaatcagatagcatcaggatatttttctctataaatgaaacctctaaaaattttcacatttaaagttagaactagctggatgcaggtggctcacgtccgttttcccaacactttgggaggccgaggcaggagaatcccttgagcccaggagttcaagaccagcctgggcaacaaagggagaccctgtctctacaaaaattaaaaagctcgcctagcatggtggctcatgcctgtaatctcagctactcaggaggctgaggtaggaggatctcttgagcctgggagatcagggcttcattgagctatgattgggccacagcacttcagcctgagtgacagactgagaccctgcctggaaaaaagaaaaataaaaaaggttagaactgtatttggtttgtaagacagtaaagatgattttattacctattgagatgatgacctggaagttgaaataccagtgggcgatacagcacatactaaagagcagcttacaatacgctgtcacatatctcatttatttacaattgatatctgtgcttgcattttgtaaatgtcagagccatataaatatgtctgagtttttaaaattataataaaagtctgggtagcattcttgaaggcacatatgataacatgccttggatctttctgaggctgtaaacctgagatttgtatgtaagatgttcttaaaaatggactaaagagatatttatcactttctaagtcttaatattagtcacccttttataagatattataattatttaaatacaaagggttatttatttatatttttctataattgaggaataattattgtgctttgagggacattttcattctctttgctttaatgttctaaacatgatttaaggttctcttcaacagatttccaataatctttgcttcagtgttatgagtacttaaccaaatataaaagcttaccaaattcgtgcccaaatgagaacatatgcttcatttttattttactatctgtcatattcatgaagatctagataggatatcctaacaattgggttaaggctatttaaaaaattaatttggataacttagacaaagaaggaaaattgtttattttatattaagctctgtattactggggaaagactggtaaatattgagtgggaatgattaattggatttgctgaaaattattttcttttaaagcatcagtatatagacagatatagaggaaaataccaaatgaaaataaagtggcagtgatctcaaaatgggtgagaagtgatgtagagggctagcattactagtagtggctcttttagtagtaaaaactaaaataattgacatgaaaaagatttagccattaaaaaatatagtttctgaaccatagcttcctagcttttaagtatttctttacttaaaggaaaaaaagttaattatttgatatatttttaaagtatgcaggtggaagatgttaatatattattgttatatatgcacaactgaataactgaagtcattgagaagtgttactatgactaccttttttggtaaataatgattttagtggtgaaagataaatggcagaaattgaaagatttaattaaaatacatttagttcatcttactactttctaactagttttaggtagatattaaaaatgtgaataataaggccaggcctgatggctcacacctgtaatcccaacactttgggaggtagaggcaggaggatccctgagcctaggagtttgagactagcctgacgatatggtgaaaccccgtctctacagaaaaaaagtacaaaattagccgggcatgatggtgtaccccatagtcccagctactcaggaagctgaggtgggagcatagatttagctcaggagatcgagtgagcgatccatgatcatgcctttgcactctagcctgggtggcagagtgagactcttcctcaaaaaaaaaaaaaaaaaaaaaaattatctgtatgtataggacacttaacctatttattcatctggtatgttttatgtcatgctccctaatgtgtatgatgatataaataaatgttgaagaaaaattttaaacggatagtctttggcagattttttacaatgtattacatagacaaagaaacttattcttcatacttcttttattttggcggggtggggggtctttttctcaagttagctttctgtcatgcaaaacacaaaaggtcaagcctattgcattttacattgccaaacttttttctctagtattttcaccaaatactgcctctgttttaaataagctagtcttatcactgtcctcaaaaattgaaagaaaaaaaatgaagaataattgaaaacagtgattcaagcaaatacttctatactaacgatacaatgatcctaataattgcagaattatttatagtagataaatagtagatacttagtatctatgttgtgtcagaaaaaggtgaagtctattttagataagctagtcttatcactgtcctcaaaaattgaaagaaaaaaaatgaaggaagaagaattgaaaacagtgattgaagcaaatacttctatactaatgatacaatgatcctaataattgcagaatcatttacagcagataaatagtagatacttagtatctatgttgtgtcagaaaaaggtgaagtcctcctagcttgctaaatgactaattcagcttcccacatatcttcctgacattaaaaaaagacaacaacctgtgtatctcttcagcttaaatttagtaaaggtattcattttagctagcaactttagtcattttgttttcaagactgttttgggctttctggaaggccaaaagtataggatattttataaaaacatcattcatattttaagagtgtacattattaacattcaaaagataaatgaaagaaaattattttaacataacattttttattttatttcgttttaactgtttatcttgataagctgtattcaatacaagtaattttggagttttaagtataaaagccttcaagaaacatagaactattattttagtgaaaagaatgaaaatcagtagcatgtttgttttaattcttttttccatatttgtataatattcatatgcttcatagttttataaacatatgcagatgtgcatattttaccacataatgtgctccgagggaggcagaataggtgttgaggtgcgatgaggtttggtaagcttttgttactagtcagttctccattttggctttcttttctgaaaaattttttatcgtgttaaaatatatgtgtgtgtgtgtgtgtgtgtgtgtgtgcgcgtgcgcatatatatatatatatatacatataatcacataacatttgtgattttaccattcttgagcgtacaattcagtgtcattcagtatatttacaatgttgtgcaatcatcaccactctccatttctggaactttttcattgccccaaacagaaactctgtacacattaaacaatatctccccatttcccctttacctagcctttggtgacttgtagtctgttttctgatttatgaatttgcctattctagatactttatgtaagtggaatcatacaatatttgtcctttttgtctggtttatttgagttagcataatatttacaaggatcatccttattgtagcatgtatcagaactttgttccttttcataggtgaatagtattacattgcatggattaccacattttgtttattcattcatttgttggacacttgtgttgtttccacttttatttactgtaaataattctgcaatgatcattaggatacaagtatttgcttgaatcactgttttcaattcttcttccttcatttttttcttccaatttttgaggacagtgataagactagcttatctaaaatagacttcacctttttctgacacaacatagatactaagtatctgctatttatctactgtaaataattctgcaattattaggatcattgtatcattagtatagaagtatttgcttgaatcactgttttcaattattcttcattttttctttcaatttttgaggacagtgataagactagcttatttaaaatagaggcagtatttggtgaaaatactagagaaaaaagtttggcaatgtaaaatgcaataggcttgaccctttgtgttttgcaagacaagcttttgcaagttttgcaaagttttgcaagctagttttgtaagactagcttatctaaaatagaggcagtatttagtgaaaatactagagaaaaaagtttggcaatgtaaaatgcaataggcttgaccctttgtgttttgcaagacagaaagctaacttaaggaaaaacccccatacacacacaaaaagtcattgtattgtataagtaaaaagtctaggaatatcttgattccccagggcttaaatgatgtcatcaggactttgtttctccccaacctcttttcccatttttcagctgtttatccttcatgtcacttcagaaagaaccccttaaaaagatagataatagttagaggacagagtcttagttcttaaactggtgccttattgatctgacttgggacacagaccaacatgaaatactaatctcttttttgttttaggcagatgtggatctcctgattggttaggcttgggccatatgctcaccctaggagacaaggtgcagggtgggggttatcttctggaaccacagggacaagagtagaaaacaatagatgttacatcagaaaagattatattggacaatgaaaaattctcctgtcaaaatcaatggaataaaaagattctctttagtatggttttctgagattctttgtgcgtttcattttttcagtggatacagagaataatggttttttgggtttttttaagtgtttgtacacctctagcagtgtaggctctacgaacactaagacatacataatataaatcgcataaatttgaaacatttgagaaatgtctgtcaccctacaaatgtaggtacatcacataagcactagagctgaaactaattgttaatgtaccttgcataccttgatgcttctgggttgatcttttaatttattagcacttttgttggatttatatgcaatatttatttccatatttacattaagtgggtttaccatactgaaaagttgatttcaacattaggttgactattattcaaattagtcatgttggcacattacattctaaactataatgtagtaatttaattttcctttgccctagaaatgtttaaaatacacatccaagtattactggcatatctgatatactcagttagggttacttgaacttaagttttcgcttaaatgctgcctcatggctaaatcagaattgtgagttgccaacttaaaatagaacataaaaatatggtatgacttataccttgcactgacaccttttggaggacgttttgttcttcaccaatcatggactgtctaaacagtgatatctatggcttgaaaacagtttactcacatacaggcagttagaggtgctggacgctcccatgacgtttccatttaagcatggccgggccaccctgctatcctcttaaacacactgaaggtacctgaacagggtaaaatgtgacagccagggcaggagagagctccctttctttgtcactggattctttgaattaaggggaactgactgctttagaaagactcgccaacctagtattggtaactgaagatcatcattttctagcaacagaaggaagaccatgcatgcgcttcaaagccaacaaatctcccaaagcaaacaccagggatcatgcacacaatgtaattcttaccctcagaaattgcccccttgcagctctatatagataatcctagtgctagataacgcaattagaaaccctatgtataaaaccataatcaatcaattatattttcaattttgtttgtacattttagaattacccccagtattctcttgggcttgtggttttctgtatttgaactactctttgtctgtttgccaaattttttacacacagcgctgatgtgcatagtgctgaagttgtggaggtctgcttattagttacactgtctaatgagggcaggaatggggttcctttgatgatgtgtcgctagcttttggcataggtcctggcatttagcaggcattctgtggctagctaaggtctagtcaggtgtgtgtgggtatgtgcatgcatcggaatgctatgcacagatggacgtatttaatcctcacaatacctttatgtggttgatatgatttctctgctggttttatagatacagaagctggaacttggtaaagtgcagtattttgcctgagatcttagagctagtgattgatataattgggattcagcatcggacttcaccccagatcttgtaactactccgctacagagtctctataaatgttcactgaccagatgctttgctacatgaaggaaagaaccaggatatgctctactatactattcggtttccatctttgcacccagttctgatcaggatagagagtgaaaagtacaatggtacctctgctgcagttctctctgccaccagccaacccttcagtctgaatttgctctgttccatattataagccaataattaacctgagtaactcagttttttccagcatttggttgggcatctacgttgttcagaacaatgtgctaggttttcttggagataattaatatttggaaattcgcagtctcttattacatacacacatatatttagggtatggctgattctgtaagtatagaaaaaaggttaaaaaatacatgcacacatacacatatacatacatactctgaatattggaaaagcttaattttaattgtggtggggtggaagcatcttagaatgtgtcttgaatgatgaggcatgtaagaaggtaaattcccttggtgagcacaggccaggcaggattacttctacccaggatgtttgctaataatttacagctggactcctaagtaacagagctgattaaaatattactcagagataataagtgtatcaaggtgtgccaagagttgtttacaaaaaaaaatcatttaagaatttactataatagctttggggaatgtgaaagaatgcggaggtaagcactgtcagcctattcctagctacctaatcatccagtcacaaaatatctggacttggatgaggaattatctttaaataaataaaatcttattaaaacaatgataaccttctttaatatacaactattagaaaagatgaaattataggtattttatgaatgttataaaatattgtcagtaccccttggggtgggtttggggggtgtttccatccaagccctttgaaccttttatacactggtctaaaacatcattatattaactatacagtattctcagaacatgtttactataactatacctcaaaacccatgggatgacagattttttaaattactatgttagatattatagagaaatcttaaatgtatgagtaaccttttctgaaaaacaaaagtgggatgaaatatattggtaaaagtatccacttatcttgattattttcattttacaacatacctctgtgtacctttgtgttttattttgcaatctataaagaacttgtccataatcacacagttatcttttcaatattgagatactgtgttttttaaaaatcagtagaggtattttacttaagcattggccaagaagaatgtttaccacatatacagtttatattctttcatgctacaatatttataatcggccgagcacagtggctcacaccaggaatcccagcattttgggagaccgaggcccaggagttcaagtgtatacatatatgtatgcaggtgtggtggcacacaagcgtgtagtcccagtgacttgggagactgaggtgggaggatcacttgagcccagtagacggaggtggcagggagctatgattgaaccactgcactccatccagcctggacaacagagcaagaccttgtctcttaaaaaaaaaatgtatagatatatgtatacacacacgtgtgtgtgtgtgtgtgtgcgcgtgtataacctgaaatgatctagaaactggaaacttcaagtctggttataacaaaaaggtttttaaccctttttttttttttttgagacagagtctcactctgtcaccaggctggagtgcagtggcatgatctcctgcctcagcctcccaagtagctggaactataggcgtgcgccaccacgcccagctaattttgtatttaaccctttcttaaactgtgaatacatgtgcactcaccatcctattttgtatacatagaaagcatggtaaaaatattgaatatttcttttacacaagtgatttgctgtatgttgagcagctctctgggaggtcagattatttacccacaggaagtggattgagtaggaataagtttacttcacagatatactaactactctttttcaccctataacatgttttgttttcttctcaacctatcaagcagatcttttcatgcttttccatggaagagccagtaatggtagtgaagaatcacaaatttccctggatctcttgcctgaagcagttcttcataaagactcttgtttcgtaccgaaaaaaaaaaaaaaaggaaacttctgttctgttatacattcatgcttattttagttcaccaccccccaaaaaaaatttagttacatcaaagctccagtaagatgtgccatattaactcttggggtttatacttgctaggaaaaggttgtaaccctctgggtgtgaataccaacaattacagactgtgtgaacatccctatgccctggatatgtggatgtcataatttgggaagaatgccttataaggttggtcagtattatctagatgtacaaggatagcaaccatgtttcttaatcctaatgactttgcacatagtaggtactcagtgagtgtttaaattaattgtttgtatgcacatttcctcattgtcaatcaagttttgttttgtttcatttttgttaattaccttttttttaaatctttggaataattgagaaacgggaagctgagattagggaagaaggaaaataataaactgaataatagaaataaactgagtaacagagaataagaagagaaaaggagaagaggaagaggttatattcatgagggttgttcagagaaacagaaccaataagattgacatgtgggaaatggctcacacaattatagagactgagaagtcccactgtctgccatctgaaagcaggaaacccaggagtcagcagtgtaattcactgagtccgaaaacctgcaaacaaggccacggatgtaaatcccagtcccagggcaggaggagataagatgttcagctccagcaatgaggcaggaaaaaaagaggggcaaaattttgcttcattcaccttttgttctgttaaggccctcagtgtattgatgatgcccaccatggagggcaatcaaccttactgagcccacaaattcagatgctaacttcacccagaaacaccctgacagacacacacagaaacaatgtttaatatgggtacactttgtcccatccaagtcagcacatcacactgaactacctacagagactcctttgcttttcagccacactggcttttgtcttggttctaaataccctctttcctaccgcatgcttttgcacatgccatttcttctgaataaatgttgttcctttccctgtttcctgagctaacttgtaagaacactatttcatcatctcttcctcagggaagactcttctgaacaccccattagttcatgtgctcaaagctccaaatgcttctctgcagtccttatcaaatttgaattttagatttgtttgcacatatttgattgatgggtgtctcctgcctttggagaaaagggaccgtgtttggttttgctgccagcatagtgaatgatatatagcaggtgttcaataaatttgtcaattgaatttgtgacttgtttaataggggctggtataattacaggagagcattctcatagtctcaggagatcacctaaggtagagaaggactgaagctctgttttccccaccgtatatgtttgggaagatggtgaaattgttagtacctgtgcacacccagtgagaagaacaaattgtcttatgtttatactttatttaaatgataatccttccacaagacaatgactaccgacttggaaggcaagagatactaagtttactaattacttaaacacaaggacttctaaattttgtagaagtcaggttattactgtgcttttgataaatgtttttaatatataatgatgttgcgagccaaagcctactcagctgcctggtgagctatacaactctgtgttcccagggaatatttatcaaaaatgagattaattttaaaagtgtttttctcgtaacacgaaaaagaaaataattaaccttcactgtttatattatttaccttagaatgccagtgtatgtggtattgggatacatgtctatataattaaactagcagctaaggcttccatattcagaattaaggttttagcagtagaaggaaattagttttgactcttcacttttactttccttagcagtgaacagggagatctacatgttttttatgtttttaaagggaagcaatactggttttaatttctcagaaaatttcctcctgacaactgagagcaaaggaaaaattcaatacattttagcacctgattatgttcagtctttttctaattatgtcctgttctgcttggagtgtatctgtgacatcatggaacttaaaaaccatactgtaatttaaacatctaaaattattaataatattgcccctttataatcaccttagcaatttgggaacattctgaagatgctggttattaaaatttttaatctgcttttcaactcctaaggctagttcttttgaatattctcaatggtggcagatatttgtcctattagaatgattaaattcttggaaataggagtaaaaggcatttggaggtattctttgtcttttgaataaatgtaagtggtcgagccttcttgatttctttaagttttttgtagaaattatgctgtaaatcagagatttgtcgtgatgatgtcaggcattgagctctttatgtgacataaagactccttagtttccaaatttttttatgatgcctatgattaatgtttggacttgtgaaatttggcactactcagttatttttaaatcagcgatggcctcagtcatcactttgatgaaccagcttggtcttgatatttttaaccctaaacttttgtgctttctttctatgttaactaaaaaaaaaaatcctgtgtcatcactggctatttttaagtttccagtgaacaatgacaataaatgtcaagtcttttactcattgaaaatcgatgggctaatttttcaaaacaagattcctttccaaagggttctatatacttctaactcctcagccatgaattgtcttgtgactgaatcagatatctgatcttgccccataaggattttacctcctgctgagggtgtttctatggctgttttatgcaccatcattattgtctacccagttaaaccgtgctcttgacattgcttcgtttaatcttttcctgccactgttaactcacttgtcaatatgattaacattactgaaaatttgatattagctatgtaattatgaaaatttgatattagcaatgtaattacagtgttacaatgtaatgtatttaatatatatcttcttctaaatgcttattttcataaattttgttttataatatcatcctagaaatcttgtcccactgacttttctccttactattaggttgctatatgcacttttaattcttttaactgctgcattttatccatatgctttggtcatttctctgttggttttcctgaccttttcttgataaattgaaaatgtgtcttatgtattatatttataaatcttttgtagtcttttgttcctgaaactaagtctataacctgttaactttgtgatgacctttgttgatgtagtcaacaattttcccattataattcgtgcattttagatctttaataaattctgcttttcactgaagtcgtaaagatacttttgtacatttccttctattagtttatagttttatcttatatattcaggtattaaatttttccgatgtttttctgacttaggtagagaatcaagttctacacagcgagtccgtttttccatcactccttaataaatagtctatcattttccactggtttgatataccaaatgtatcatatcatgagtatgtatatatattaggttggtgcaaaagtaattgcagtttttgccattacttttagtggcaaaaaccacagttacctttgcaccaacctaatatatgggtttgattataacttgtagctttattcttctgcaccctttaacaggttaggcttttaattttctctccagtactctgagttccctctccttgtgtatgatacaatccggaaatttgctatggcacttgcagagctcacctcatttttacgttctttcagagttctctgtccttattgtccaaagtctgaaaacctttgtctcatgttttactgggttttctgattgtttaaggtaagagggtaaatttcatacctgttattccaccactgttgtaagcagacattcattttttaatttctcagtagaatccttagcttgcttattttcattctttcattagacgtgaaaaaatctatttaaatctctatatcatgccctactgcttttagatgcagctcacacagcctcggacatgcagaactctcactgtcattcagctcttcagtgttttgtcatttttcttgctagttcttgcttgttccactttatttagctgtgagttcatttaactatttttttcctgacatgcttttagattcctttttattactaatttaaaattgtattgaattttacttagaggttgcataggttgattctttggagacttttttgagacgtcctttgtggtctaatacataaaatattcatatattcttgaaaggaatgagtaagatttattggataaagtttttactgtatatacatatattttagattgttactggtgtcattcacattcttttcatattggcttagttttttctacttgatacgtttctaaaagatgtattacaatttctaatgaaagattatatgtttctccccacatttctgtcagttagtagttacatatcacatgtatgtatacttactagtattatatcttattaatatattattcttatgaacaaattatgtatcttttctcctgaaattgcttactgtactatttaaattgctacttaatatttcatttggttaatacttatgtattttttgtccatctcttccatcaacctttctttgtcttttgtggacaatttaatgctagattttttttttttgtaaatcaaatctaaatcagtcttttgatgactaaatttgaaaaatatatgcttattgtatttattattgtatggaggcttatttctcccatcttattttagtttttattcatcgtactttattgtttattttttcgatcttttctatgttctgtcatgttgacaactcagattttaaactttttgtttttaagttacaaggtctattgttctcttatctctaacttaagattcattgcatttgtttttttcttccaatgtgtaaaagttaatctgtcttcccctgcaataagaaacctcagtagtctttcaactcactcctctactatgatctctttttctttcatgttggcatcatctggagttttcattctatatgttttttgcttactcaggtaacaataaatttactaaggtatttactctccattggttaccttatctcttggctttctctggaatgcacttctcttcttgttggaacacatctttcaagatatctttcaaagaggactcatcattatgtgatatactttataagacaaagaagccactagtacttcttcctacgccataaatctgtggtcacatataaaactattctgtttctttactcatttgttcaacggctatgttgtatgtaggccacgtacttgtcctagacctgagaaaagaaagtcaacaaaaatctttgcctactaacgtttacacaagacacagcagggaggggcagaggatactcgaggccagatcagcagttcctggcaatggccccacactatggcagggctccagagctgccaggatattgccatgtagtttctggatggcactgaacaggttctgctgctttctcattataataactgggcaagtgatatttttactaggcaactcagagaaaaacaggccaactagagagctcttcccaatccatccctaatctgtggctactgaatcttcctcgattataacttttctatccatattaggatattaggataacttcttcctgcttccccaaggtttcttggctgtagttgtagtgtttgttttatttgctaagtttggttctgaaaactgccaagatcccatattgtttgtagtatctctgggatttggctgggaaagtaatccgactacccatggtagttttccttcttgtccagaattgatagtcctcacagaatatattattattattatttactattattatgggatgtgaatgccaatggcagtcaatgctgagagagttttcacagatgattatcaagcacatccttaattttaaagagaacatctaggaagctcaattatatatgtggtctgttagcctataaatgatcagaacctttggaaaattatatctattgaattcctaggaaggttgatcattgtggggaaaaaggaactgagtggaggagctgaggatcagggtggtcctgggccatttctacctggttccaaatctggttcagcacctacttccagccctcatgggagtcagaagagactgctgtgtggtaagtgtcagaatcagccctgaatttctgaagaagcaagctcagggagctctcataatgattactacataaacaaaccatactgtccatctgaaagcatcctggcaatgtgtcttgctcaccttctttgattctaattcctttcctaccctgtctgttctctcctaatttttagacatacccccaccgtctttggctcattgaatttccagctaaaggaacctaattttatatttcctattagtttggtggtcagtaatttctttgatactcagaaacttctcagagcctatgtctgggaagggcaccaacactgcaaaagatagtggaaacagactttgtcctgatgcattcagaaaaataaggggaaaaatgtgaatttggggtactgtacttacattgaaagcaatgtcagttgcaggctgaaacaaaagccaaggaagggtaaagcctgtattaaatccccttttatgattccccgacactttttttcttttgttctctaacttgtattaaatctgtttatcatagagatagacaacaggatgagattacagtatcctaaaacaacaaaataagatacatgactgtgacaaaaacaatcgttacatttagtgaccaaacaacaaaatagttgaacttaaaatagtcttaagtgaaaaagacattggtggtattccaaagccagctcacttaagcaaagcgtgggtattaatttttaaaaactcattttttttaagataaatatagtcgtgttcttgccaaggccaacattttcatgttcactctgttaaatgctgtgtctagcaggaacacatattagagtgcaaagtaacttaagctcttgagagattgatgagataacatttctgacctaatttttgtttgtttgttttgttttgagaggaagtttcactcttgttgcccaggctagaatgcagtggcacgatcttggctcactgcaacctacacctcccaggttccagcgattctcttgcctcagcctcctgaatagctgggattacaagcacctgccactacacctggctaatttttggtatttttagtagagacggggtttcaccatattggtcaggctggtcttgaactcctgacttcgtggtccacctgcctcaccctcccaaagtgctgggatcacaggcatgagctaccacacctggcctacatttctgactaaaatttaaaattttagccatgttatcctccctttgcctaaccaattaattaaaccacacatatagtcatacatagcccctctggttgtagtagggaatgcttttcctatcagaaagtcttagtgaatcataacttcttgaaattagaacctgagtcctgcagctgtccactttttctgtgggttcccaaggctgttgatttcctctgccataacagatggaatgcaagagaacagaagagaatatccatctaacaggaggcaagcccattagtattccaaatgtattcatatattaaagccaggcaatggttacatctgaaaaaaattccttagacttatcaaagcttcacctataacacataggcagcttgacaatggttatatcctcaaaaaaaaccttgacttttctccaagtattaactttaccacataggtggttagagcatcaatgcatagtttatcatctgtaagtatagaagaaaagaccttttgcttcagagaaatggttaagttataaagatacagatatatttattaaaatacagccattattaaagatggacatgcatgtcataataaatagtagcactttctagggttgctagggtgtttgtgcttcatttgattattcaagatggaaatgtgtttgtacatgacacagtagatagtcctgcacgaggaagcaggggacagggttctagttcttcttctaagggctgttgagagagtcaaataacactaatgtatctaaggacccttcttaaaaaggtaaaaattgtagtacttttttaaaaaagatatctatgatttatttattactttcacctgggaacacggaactaggagttgaatgggaacatttatggattacctgtgtatccagggaggcacactctatgttatttactctcttaaaaaaaaaaaaaaacaaactgtaagaagagtaatgaaaagaaaacggataactcattgagttcccacactgcaaattacctactgtttctcgtttaattctcagtaaaatcctatatgtctcactagcaccatttaaacaacttagattaaataaattattctgtgcagaacacttagtgggggctgaaattaaaaatcagatccccttgactaccatgacttcacagcttaggctgtttcacattcaccttatttcagaatcttcatttctacataaagacttgcatttattcataaagccaacattgtgttttgataactctggacatgtttataacaggtctgtatgtatttaatgagtgttctgaaatactatggcaataaattaaagatgaacatattcttctgaaatattcatggtaggcaaaacaaagagcaccaaatccagaaaaattgaatggcgatttttttttccaccttattgacaaatgcaagctgttcatattttgttatttggtgaatttgctagtcccattgtaaatgtcatcctcctcaccctgtaaaactgattcagagaagaaagcctatttaagatagaatttagaaataagaaatgacttataaaagaattatatgattaggaagtattgtacatttagacctcacaacagtgtataatagaaaaattgtagtgtaattatttaatttttatttggaaattgaatgcaaaatattcattttttcaactgttattaatctctatcctggaggtttccaaacatgaaaaatacatatatgtcactgtattccttgtgagcacaacttgcctctgctcccatgaaattatacccttttaaatataatcaagtaaaaaaaaactctttctttatgcttattaattttttaaatcctgatatagcccatctctgatatgtctgtattcttcacgtatcaataactgttcaggccatattaccagctaagtgcccgttctgaattgccccatagagttgccttccatcttcctcatgcttttcatacaaggtctgttttcctggtcctcccaaataccaaaccctgctttttaccttacctctatgctcaagacctgacagtaattgtggtgtaaggaagagtgtgggtctggatataagggtgagagtgaaaacccagcttaccaccatcaaactcttaacaccaggatcctggtacttttgcatccctagtttcttccttatgactttcatctcacctctgcccctcctcatcctcctcagccacatcctggctttcttcccctcccctccccgccttgcctttcttctcctttctctccttctctactaacacaatctattgcttcagctccaggtatttctttttcctcgggttctgaggaacaaaatgcagccacacagtttcctctgtactcataacaccagagcaagctcctaactctgtagttgtctggggggttttattattaaaaacattaggaaataatggaataattaacaggaagaaaacagtctctgtactcataaccccagagcaagctcctaactctttgtagttgtttggggggttttattattaaaaacattaggaaataatggaataattaacaggaagataatagtctcatttcaaggattaaagttgttacctgagatggctctttgtgtatccagagatacaccattagactctacatcactatcatgcagctttttctgtctcctcattgtcagaataaattaagagaaaaagtgaaatctaggaagaaaggggcccgctctctccgatcctggtaatagataagtctatgtggttcttctggccagggaattgtggttcatgaattttgcatccctgagaagttcctatgtggctcccaccatagctgcaatagactgaaacttttggaggcgtagttgtaaaggtggaaagtgccgggaaaaagaatgggtgggttgggagcattgattctaaggctccattctctttccagtacccaggggaggcaagaacgctcagaatgaagcagagaaagtggagaatcaggcaggttcattccagtggcgtgtaagataatttaatccaagacatgtgtccaatccacatactttccagacatttacagcttcctgtttcacaggtcagagggctttctgcaggaggatggttggtgagatgcacctcattctatttccaaagtaatgggtaggtgaattgtaatctatgggtagaggaattgtaatcttaacactcaaaattagatcatcgtttaacatacttttccattaaaacatcactctacattatgggcagattctatattagtagtatatatcaggtacattatggttttgatagagttttgtaggaatcctagggcactgaggtccatttttctgtagaaaactcttcttgagtgctacacaaaaagatttttggagtcttataaattatggattggcttgtaaactcaaaaaatattttctctttcttcattgagaaaattaggaaaatcagcatgaacaatttaaatttgctcactacatctatgaataatacatatatgttctctttcatcattttgcatgtgggtggattatcatggaagtgaaaatatttgaaagactaaatacaaatctctacttgtaagagctaataagtggctttcttatttagaagatttgtgtgttattttgaaatacaaagaaaattacaaaggattactaaaatgtagtaactacaactaattaagcatgaatatgatagcatgtaaatacagtcaaacttctacttatataaattgatttatgggttaatttgcattgtatcttctaataaataactcactatatacactggaaaaaatctaagagacaaaaattggagcaactgatttttctatttataaaaagaatcaaataaaaatatattttgcttcctaatggaccttgcaaaacaaagtttttttactttatcttccctcataattgttttgcctgttttcatacttcaagggatattgggcaaaaatgttactgtcaccatctccactttatcaacgttcaatttaaaataatcgtagaagacctatgaatcccccacatttaagtagctctcactttaataagaattttagtaattgatttaatatttacatggcctgaataatgcaactgagattttctgcctccaccccatcctcatccttttggttgcctggaaacatacaaccaagtatagacccagcaggacagaaaactaggtttaactttcacagaaactgatgaaataaaatggtttctttcaagttaaaactgtttctttcaagttgaaactgtttttttcaagtttcatatttcagtggacaagtgtgttaaatgctgtaactttcccctggataacactggggaaagttatctagtgactttcatatctattgtgtgtaggtatgcatgtgtacatataaatgtgcatatcaaggcaatccccataaacagcaggaggactgacaatgactgacttctgatgaaatttagtttacaagcttgtctagttattcacacagtgatttggtaataattcaggtagtaatttgcccatagcctcaatttctttcctaataaatgatagttggaattactgacttcaagaattgaaaattgggattattaaacctataggaagctgtgctaagatgaactcagttgaaaacaaagttcaaagttctgtatctgcaagaattagattttgtccaacataggtgaattttattacaaacaagtttgtctatcgtgataaagttgtcatgtttttagcatttatggtgttttacagattatgagagtcctcttaatcagctgttatatttcaatagggaaacaaaattaggaatatactttttataccaaatatagtgtaacctgacagaaatttttagtcacagctaaagaggtgttaaaattttcaaaggacatctcatctgtgagagacagtagaataagttatccatagaagtgtagtttttttttttttctgggcattttaataaaggcctagtaccttttgaaggcctgtttcaatttgtggcagacttttttctttaggttaaaaagatatacatgattgcttcctgagatttctctagctgtgtgattctgtagcatgttttaaaatattaatgtttatagacataagatgtcttaaaggatagcatcctatattaaaatcagcagcatttgcaagactaataatgaggaaaattcactcatacacatttactgtactttgattcaaaatgccttatttacttaaaggtagtattcttagaccatatttgtaaatgagaaagagaaaaatgccacaaaatgaagcaactcttctagaaacttaattaaaatcatgatgatacattcagcctggagtttagttttattttcagctagtcatctgcagccatgcttcccacagaggaaggttgccaggcccacagcgcactgtgcagcttggatgagcagtattacaggctgtttatgagcagattacatctgggatctgtggagagcagccagagcagcaagacagagatgatgaatgcagggtgtgttctaggtagattttctagccaccaaaatgctcatcacttttctttagtacagtgttcagagtattataaaaacaaagcatttttcttagttgttcacagtaggaccagcaagttactctggtttttaaattctgattttaaaattgttcatatgaacagaagtctcattctgtgggcatatttgtgcattcttcaagttaatttggtggcttgtcactaaagcagtaaactagttttagctctagcaactgaagcagccattctacagttgagattgggatagtttgcctgcacgtctgtatcaaaaagtggcatgccttatgtgtgtgtgcatgtaccatgttcaagggagcagctacacaatgacgaggcaatgcagaagacctgttcatccaggggcagggcacatttccatcttgggatataggtattcattcaacaaatatgcactaaagaagtagcatgcacttagaagtccagatattaaaataaatagaacattttctagttcccctgtggcttgtagtctagtttacttggttgcagcaaagcagggcatataaggacaggctggaacctgaaatgagctctgtcttccatgagaagaaggcacgtgataggacattaaactcatctgcaacatctgtgtggatatccagtccagtaaacaagagctttctccatggaaggtggcaagtggcagttggcatatgaaagagagagtgtcctaagttaaggtcttgaagtataccataagaaaggcaatatgcagaaaacagttaacatggcaggcctgggactactgtccttagaaagacctgctcacaaggtttgcttttgcctggagtttgagaactgaataatcaacagtttcctacactgatataaaacttttcctaaatggcaagagtggttcactgtgtctaaactacaatgtggtttctgctgaacatctgccttccatttggctacatgctgggcagaaggtgcttctacgactagcccccagtaaaaaccctgggcactgaatctttaatgaacttccctggtaaacaacatttcttgccacaaattattgctaaagaaagaagtgcatcctgtgtaacccaatggtagaaacccttggaagcttgggcttggcttcctcaacttcaccacctgaacctgtgacctttgctctgtgttcttttcctgtgtataatcagtaagactgagggtggtcttgggcacctccgacacagacagaatctagattgcaagctgttaggtagctgcaggaaatctgataaatagcagtatcctgtctgttgttctttagtccaaatatgagactccaagggatatcagtccagtttgataggctgcttcatcacgtccccagtaaatataagaggccactcaatcttccttcttttcctacccattagttttgagtgatagaaaacttaagctaaatgggaattatttgattctcataactgaacaatctaggaatagagcttgcttcagttggatgcacagctcaaatgatgtctccatttctggggcctgctgcttctttgctggttatatatatccttgttatcagaagatgcctgtagaagccctaggctcacattttccctccaagagggaaaagccagagttgaaaactagaactcatgagtttggtttttgccacgtacctacctctgtaccacatacggagggaccccagaatcttgtcatgagcttccctcactcttcccaaaaacacagggcctagaatggcatttttcagaagttgagtaaagagatactggggggccagaatcacagcagatgtttactactcccattacccctatcaagtaagaatcactagtttacctgataaattttatgaatatgtcttcaatgtttgtacaccttttggaaaaatgcttcctgaaatagctaatctgtcagatatagcattttgattaaagtaccccatacatagattagtgcccatttctgaaatcctctttttgtattccagtgaagtcctgtatctaaattcataggatagatgtaatattcaggttcataatgctattcagattttctgtatgattaggcctatgcctatcagaccaatttagatttcagccttgttttcctatctagactcactaattggactcattattacgatgttcctatggccttttaattctgagtcatactcatattactcatctcctgagcacagtaatttaactttccatcaccttgaagaaaggagattagctttttatgaacaaacatttcctggaacgtagtcaacagtttgtgtgcaactcaacagggaataagatgcaactcaataaggaataaggtaatgacttcttaagagaatttatttcctggttgcttatttctttgagtttgaatgtgagactgctatgccactcacctcattcatagtagataactaaaactatataaactatgtaaatataaaattatttaaatcccattatatctttttttaatcttagtgtctaaaggtaaatgaaggtgacgcatttgggatattttagttataaggcagtgcaaaaagaaaaagttagcctttaccactgaaatgttcaaactactttagacacatctttttctagatttcacttttgtgaggacaagataatttcttctcatttgtgattttatttttagtacacctggtagtgcttaaaaacatgagatcttccatggtgtatatcagagatatgccactgtttaatttattacaagaagtatgaactgagtattgaaataacattgcacactgatagggagagaagacacatttcaagtttaaaaatagttctcttcatgtgtatgtacatatcttttcactcttcttttttttaatttttattttattattattatactttaatttttagggtacatttgcacaatgtgcaggttagttacatatgtatacatgtgccatgctggtgtgctgcacccattaattcgtcatttagcattaggtatatctcctaatgctatccctccccccaccccaccccacaacagtccccagagtgtgatgttctcattcctgtgtccatgtgttctcattgttcaattcccacctatgagtgagaacatgcggtgtttggttttttgtccttgcgatactttgctgagaatgatggtttccaatttcatccatgtccctacaaaggacatgaactcatccttttttctggctgcatagtattccatggtgtatatgtgccacattttcttaatccagtctatcattgatggacattttggttggttccaagtctttgctattgggaataatgccgcaataaacatacgtgtgcatgtgtctttatagcagcatgatttatagtcctttgggtatatacccagtaatgggatggctgggtcaaatggtatttctagttctagatccctgaggaatcgccacactgacttccacaatggttgaactagtttacagtcccaccaacagtgtcaaagtgttcctatttctccacatcctctccagcacctgttgtttcctgactttttaatgattgccattctaactggtgtgagatggtatctcattgtggttttgatttgcatttctctgatggccagtgatgatgagcattttttcatgtgttttttggctgcataaatgtcttcttttgagaagtgtctgttcatgtcctttgcccactttttgatggggttgtttgtttttttcttgtaaatttgtttgagttcattgtagattctggatattagccctttgtcagatgagtaggttgcgaaaattttctcccatgttgtaggttgtctgttcactctgatggtagtttcttttgctgtgcagaagctctttagtttaattagatcccatttgtcaattttggcttttgttgccattacttttggtgttttagacatgaggtccttgcccatgcctatgtcctgaatggtattgcctaggttttcttctagggtttttatggtttcaggtctaacgtttaagtctttaatccatcttgaattaatttctttgtataaggtgtaaggaagggatccagtttcagctttctacatatggctagccagttttccccacaccatttattaaatagggaatcctttccccattgcttgtttttctcaggtttgtcaaagatcagatggttgtagatatgcagtgttatttctgagggctctgttcagttccattgatctatatctctgttttggtaccggtaccatgctgttttggttactgttgccttgtggtatagtttgaagtcaggtagcgtgatgcctccagctttgttcttttggcttaggattgacttggcgatgcgggatcttttttggttgcatatgaactttaaagtagttttttccaattctgtgaagaaagtcattggtagcctgatggggatggcattgaatctataaattaccttgggcagtatggccattttcacaatattgattcttcctacccatgagcatggaatgttcttccatttgtttgtatcctcttttatttcattgagcagtggtttgtggttctccttgaagaggtccttcacgtcccttgtaagttggattcctaggtattttattctctttgaagcaattgtgaataggagttcactcatgatttggctctctgtttgtctgttattggtgtataagaatgcttgtgatttttgcacattgattttgtatcctgagactttgctgaagttgcttatcagcttaaggagattttgggctgagacgatggggttttctagatatacgatcatgtcatctgcaaacagggacaatttgacttcctcttttcctaatataatcccctttatttctttctgcctaatcgccctggccagaacttccaacactatgttgaataggagtggtgagagagggcatccctgtcttgtgccagttttcaaagggaatgcttccagtttttgcccattcagtatgatattggctgtggggttgtcatagatagctcttattattttgagatacgtcccatcaatacctaatttactgagagtttttagcctgaagggttgttgaatttggtcaaaggccttttctgcctctattgagataatcatgtggtttttgtctttggttctgtttatatgctggattacatttattgatttgcatataatgaaccagccttgcatcccagggatgaagcccacttgatcatggtggataagctttttgatgtgctgctggattcggtttgccagtatttttttcagcaccaccccacacctattccaaaattgaccacatagttggaaggaaagctctcctcagcaaatgtaaaagaacagaaattataacaaactgtctctcagaccacagtgcaatcaaactagagctcaggattaagaaactcactcaaaactgctcaactacatggaaactgaacaacctgctcctgaatgactactgggtacataaataaatgaaggcagaaataaagatgttctttgaaaccaacgagaacaaagacacaacataccagaatctctgggacacattcaaagcagtgtgtagagggaaatttatagcactaaaagcccacaagagaaagcaggaaagatccaaaattgacaccctaacatcacaattgaaagaactagaaaagcaagagcaaacacattcaaaagctagcagagggcaagaaataactaaaatcagagcagaactgaaggaaatagagacacaaaaaaccctttaaaaagttaatgaatccaggagctggttttttgaaaggatcagcaaaattgatagaccgctagcaagactaataaagaagaaaagagaggagaatcaaatagatgcaataaaaatgataaaggggatatcaccaccaatcccacagaaatacaaactaccatcagagaatactgcaaacacctctacgcaaataaactagaaaatctagaagaaatggataaattcctcgacacatacaccctcccaagactaaaccaggaagaagttcaatctctgaatagaccaataacaggctctgaaattgtggcaataatcaatagcttaccaaccaaaaagagtccaggaccagatggattcacagccgaattctaccagaggtacaaggaggaactggtaccattccttctgaaactattccaatcaatagaaaaagagggaatcctccctaactcattttatgaggccagcatcatcctgataccaaagccaggcagagacacaacgaaaaaagagaattttagatcactcttcttttccttctctcctttcctttttcttccattttccattttatatacaagggtgaagaacatgctaaatatcctatttaaacatccaaaatgtgtgaagttaccccatttgcacatttaatttgttcatgctgtgagagaataattgagagagatgtaagtagtgtgggtgactctggttccattccatgaacacatgccccagattgagcagtcaaatgggagattgcaatctgcagttttctcataaggtctcaatgccttgtatgtctctcatagtgtgagtatcaggctaacttgagtctgattcttcaatttgaagacacagatgttacaataaaaatgtccctaaagacaagccagctattttgcctggtgtttagctgaaggaatagtaatctgttcaatgatagaggggggaaaagcgtggctactatagaactactgagtggcagaatatggtatgtcattctccaaatggacacacaaacactggttattttactttacaggtaaatcaaggattttctagcatgagatttgtagaacctaaacattcccattgtatcatattcatcaccatccatgcttcaccctaatgttttgggcatgtgggtgtataaggcttgtcttatattttcgaaagagtttcttcttttcattggttcttttctgtgcagtaatttgataataggtatctatagtcttaaaaagagacattaaacccatcatatttacttctagaaatttatcctaagggaatacttctacaaatggaaagctgtacatgtatgttcaccagaaggctttaaataagaacaaaaattatattcccaacaacggattgtttgctaaagcctcctcaatataatgatgtactattcagtcattaaaaataattgttatgattaataataactgataacatctcttaagtgtttattatgtgccaagcatataataaacttacatgtattattgtagaagaattcaaaattcttatatttcatagatctacataaaaatgtcttatatattgtatttttatgtattcagtttaaatatgcacatatacattttgtgatttatgaaaatattatagaaaaaagtcttcaaacaaatgtaagtaatgattaaaagtaaatgaaggaaaatgattttttaaaatattttttgttttctaagtttctctacagtgaagatattactccattaggccaattaattgcaaatttaaatgaaaattcactgaaattaaataaaataaaaaattcaccttctcagtatgctagccatatttctagtgctcaagagctgcatgtggttggttcctgccatattggacattggacagagcagataaaaaacatttccatccccacacagggatcgattacacagtggtgcctaacctttgaattagaagttgtagtccaataacaattccctgtagaaacattgaaacatctgcatcctacttatagcagtggaatagctgcatcttttttctgcatgcttggggtaggcagttgggaattgttatgacagctgtctgttaaagaaggggtagtgagatttcaaaatatggagctctgcttgagcttatctttcagatagtctgtgcaggcttgcaacagcataaccacgttcttttaaactgtttgacctaatgtgttttaacatgtgctagtcatgtaggtttcaactcaaaatcctcttttttcatggatggaaagattgagtcctagaaaaattaaccagaaggcagaataaatctcttattctagaagtttcttaattcacaggaacaatgataaagaaagaactatcaactagaaataaccatcaactagtttgttctcaggaaaataagcattgaactaagggttagaacttgttggtctcttcctcagtgttttttcttttactaaacccctcacctccctggttaaaagttagagaagtgaagccatattattacatttctacttcattctctgggaagttcaaattccactaaatgggaaaaggacacgtgttttcactatacatgtaacttgattctagctataaaaattgtacatattttgtcacactattgacagaatgattagtttctcacttaaatatatgcaacttttataaccttttgattatgtgaaaaatataatagaaactgcaagatgttttattagggtatactataaaatacttgaagtcttaaattgcagataacgagggatattaatatttaaacttcattgagcagtgttgttttcttccagaagttatatgtaatttacatataaacacatatacatacatatatgtatacatatatacacacatacatacatatatgtatacatgtatacacacatacatacatacatgtatacatgtatacacacatgtacatacatatatgtgtacatatatacacatatacatatatgtatacatatatacacacatatacatatatgtatacatatatacacatatacatacatatatgtatacatatatacacatatacatacatatatgtatacatatatacacatatacatacatatatgtatacatatatacacatatacatacatatatgtatacatatatacacacatatacatacatgtatacatatatacacacatatacatacatgtatacatatatacacatatgcatatatgtatacgtatatacatgtatacatacacatatatacatatatacatattcatatatgtatacacgtgtatacatatataggtacacgtgtatacatatatgtatgcattcatatatgtatacacgtgtatacatatatgtacacgtgtatacatatatgtatgcatatatacatgcgtatataaacatatgcatgtatgtatacatatacacatgtatatatacacatatatgaatgtatgtatacatatacacatgtatatatacacatatacgcatgtatatatacacatatacacatatatgcatacatatacatatgtgtgtgcatatacacgcatatacatatgtgtgtgcatatacacgcatatacatatgtgtgtgcatatacacgcatatacatgtgtgtacgtatacacgcatatacatgtgtgtacgtatacacgcatatacatgtgtgtacgtatacacgcatatacatgtgtgtacgtatacacgcatatacatatgtgtgtacgtatacacgcatatacatatgtgtgtacgtatacacgcatatacatatgtgtgtacgtatacacgcatatacatatgtgtgtacgtatatatgtgtatatacgtatatacacatatatatacacatatacatatacacgtgtgtgtgtgtgtgtatatatatatatatatatatatatatatatatatataattttttttttttttttttttttttgagacagagtctcgctctgtcgcccaggctggagtgcagtggcacgatctcggctcactgcaagctccacctcccaggttcaggccattctcctgcctcagcctgccaagtagctgggactacaggtgcctgccaccaagcccggctaattttttgtatttttagtagagacgggatttccccgtattagccaggatggtctcaatctcctgtcctcatgatccgcccgcctcggcctttttttaaatgacttattcagtttagttacatcctgaggtacatttaggagtaacagacccactacttgttactcagggttctggctgggcacagtgatatgcacctgtagtcccaggtacttgggaggctgaggtgggacaatcactggggccaagaagttcaagaccagcctggacaacatagtgagaccccatctcaaaaacaaaaagttccactgccgttggttatgattctatctcttcccttgcaggatgatttggtcatggtccatgatgcttcttaagcacagatgagggttctcctagccagttttccttgtagcattaattaaagacaattcttgtaagcatccgatggtttcatatccatttcttctttttttcttttctcccttttttctttgactttttgctttctttccctctctttatctttcttgcatctccctgctttattccctaatctttacatctgttatattcttgtgctgccagccaaagccggtatttaccaatgaacctagccttttggattgactttgaacttaatgattgatcatatctgctttagctgttggccctgacctaaaaaagatatacattagcccaaatagatcagtttaattttattttcccttgtaatcatttcagtgttagaaattttagtctgtcttgtattttagtctgggtttaaccacttcagtatgcaagctaaatcaattcagcaggaggacaaattatttcagacttgaaggctaattttatccctgtttgttattctctttatattgagtaagtccttttattaaaggtattaggggttcacttatctgaatgttcattatgggtgaaataataagtttaagaaaaatattgttgtgatattctacttttaatcatcatattcacaaatgttctactaatcagattcaatatgtggataaccagtgctcagtgaattagaattaagcaacataaagccaaataaaactttaactcaaaagctaagatagtcatgttacttactaaggacaacttgaagacacttgaaagtttgcagagtccattttcaatttagttcattgagctgttactttttgcaaagccctagtgacgtggcactataggagaatgctggtatggccatgtttactaaatgtttgcaaaaacatttattaaaatgtattgaacattaatgtactaactgcctatcaaatgtactacacatttaaaggtatattgtctagctttttgacatattgtacatctcaccattttttcagcatctgtgttacttcctactaacacgttaattgtgaaagttaatttattgttcaataaaaataatggatttactttttcaatttcatatggattgtgaattcaaaaattgaaagcttacattttcacttattaacagaatctgaggatattattttgtgggcttaaagtaaattgcagaaaatgtatttcttttcaatttagttaatgaataacttgaaaatgaagaaactaagaccaggacacacacactccagaaaaagcacataatctttattgcataaaagatcagtttttctagttagaatttaacttttatcttacttttaaattaaccatggattttactcttattagaaaagagcggtaggcctggcgtggtggctccatgcctgtaattccagcactttgggagaccaaggcgggcagatcacctgaggtcaggagtttgagaccagcctggccaacatggtgaaacctcgtctctactaagaatacaaaaattagctgggtgtggtggcacgcacctgtagtcccagccagtcgggaggctgaggcaggagaattgcttgaacctgggaggcggaggttgcagccagctgagattgcaccactgtgctccagcctgggcgacagagtgagactccatctcaaaagaaaagaaaagagctataaaactataaaggaatgttttgttttctataaaatagacatagataaaattattgaaaaatcccaagtattcatttagaatgttgctaagcatttttctagaaaattggccaatctaatttaaatgactgaatatgttgttgctttcttatttttgataactctcattgggttttttcatttaatacttgtggattagttttctcaataggaaatatgcaaatactaaattatcatggtttccttcttaataatgtgaaaatatcttaattgaatttagagtagcttaaagcaaattgtaacatcaaaaaattttttaaattttatttctgattatatggtttgataaattaatataaacatcaggatttgctttttttctttgctaacatgacagtgttaaagctctacaattttgctttattgagaaaaagatggaaaatataatatgactttggttgtttttccttatttacttttcatcttctgtcaatatcctcattctaggagaaattttttttacctgtgttgcagagggcttttctgtcactactttggaacaaatttgatattgtttatttttaaagaaaattgactagtactgtattaattgtccaggctactatttatatttattaattgctattttctgtagttgtgtggcagattcataagaatctgtttgaagaaataagtttattgtttaatgcacccaatttattggtcaaaaccaagaaagcagtgaaattaaaaattaagattacagtagtttaaaaaaaaatcttttgactaaagttcggttaagcgtcagtagttgcacagatcaagtcacaatgataaaatcataagcagtctatcactcatccagtgagatctgttgtagtaccatgccaacagtaggtcctgtggccgggccagacagttccaagaatctccctggggagaaataaagaaacacacacacacacaagtcagctcagctgttcctgtgacccaaacaagctgaaagggtgaggaaaggtggccttgccagcttgctgcaagacaggcagattaatgagatagacaagggtaagaggcagccttattaattacagaaatatagctatggctgcttctctgctcaagctctttttattacttacaatgtaagtagcatgctatgtggagcagaagtgggaatgtaaactgcagtagaatgaatgctttttggtaatttgcaaacttttaaggccagaaattacctaatagatcttctcttctttataggagagtagaattaatgtatgaattaatagacttgattaaacctagtaaaaaaatcgttcagataaccatatttcccaaaataggattattctcctcctatggtatcaataatttttttagaaaaaccatagacaactaataataatgatcaaaccactttaaaaaattgttatttcacagtaaagatagatgttctcagctgaatgcctggaaaagactgtagataaatgttgagcctgtttagattttagcagcaatgtgatttaggggactgagccctgatctgagcctattcctgtcactaacctaaggcatgttcataacttctctgagccaccaggtttctaatatgtaaaattgcaatagtaatacataccttaaggattgtcagcagtaataggctgcagaaaatgatactcattatttccaagttcctgccttaatcttcactgtcgaactcaggaagcaatgcatttcacgactcctagaatttatttactaaagaaacaatagagttgagtaaatatattacagattttcatatgctttcttaagataaatcacaagcctccaatcttttttggcttaaagtattcatgatatttactgaggagacaagaatgtaagataatgttttctcctctgtgaaaggataggaataggcaatgaggagtgaaacagtgcgggtccctcctccagttgctgagagttcagtggaggagtcaggaaagtaaagaagcagttatcacacagtgcagagatgctatagaatggtagtcacagggcagaggcagagctcagcagaaggttggaaataatgatggagagactggggcagagctggtgaaggtttcccagaggacaagcatcctagatgcatcctcaaaattaaatgttaaaaaaaaaaaggtatatttgaaactttgagagattcttagtgatttaggtgtccagaatttttctattgccacttgctgtttttaaactatatataagattcattgtttaaatatgaaagagtatgaagaaataaaattattcataatcttaccccagagatgacatttcactttgcatcatgtatgtatactttgacttaacagaattaaaattatgtaatatgtaccactttgtaaggtttttacttaatatcagagtagttctattttctcatattattttaaaacatttttcatagctgtatagaatttattgtatgggtcagccataatttgtttaatcagtcccataacatagggtctcagtatatgtattggttttctacagctgctgcaaattacctcaaatttaattgatatgtaataactgtacatatttatggagtacaacgtgatgtttcaatacatatatacagttatgtatcaattaaaaataaaagaaaaccttaaaaatgaaaaaaatcccacaaattatcttacagtctagtatgtcagaaatctgacagaggtcagatagatttacttctgcctccgtcttctactattaagactctcatgcttatattaggcccacctgaacaatccagaataatctccctgtctcaaggtcaattgatgagcaacatttaattctatctgcaaccttactttccctttgccaggtaaagtaacatatcacatatttagggaagtaggacaccgatagctttgaggatagatattctgctgccacaatgtattttttttcagttttataaataatactgtttaataataatgatgctctaatgaacttccttttacataaatctttagtcatatctctatttctttaaggtaaacaaatggccaggttttctctgtaaggagaataatattctttttatttcttcattacatataactcaatattttatattaatatatacctagtaattgcttgatttaggacttaaagagtaatatagactggtattacttaaaattggtgactggcttattttacagattatcgggtttctacccaatgtagtaattttcttgctacttctggcaagtatagacttaagactactatgtagaagtgtaaaatattattggccagagattagttgaaagtagaagctgatgaagatacaaagaattatatttattttcagtaaaaatgattatagagagttttgtaaatattggataataaaaacaacaaatgagatttggcctttaaaaggttgtttatggccaggcctggtggctcacacctgtaatcccaacactttgggaggccaaggcgggcagatcacgaggtcaagaaatcaagaccatcctggccaacatggtgaaaccccgtctctctaaaaatacaaaaattagccgggcgtggtggtgggcacctgtagtcccagctactcaggagactgaggcaggagaatggcttgaacccaggaggcagaggttgtggtgtgccaagatggtgctactgcagtctagcctagtgacagagtgagacttggtctcaaaaaaaaaaaaaaaaaaaaaaggttgtttaccactgaagcgtaaagtcggcctctactcactttctctgtataatagtatatgactaccttgcaaatattcatatagtttacagcagttgtaaaatatagggtaatttgttagagtataaggctatatttatactaatatatcttaaagtttctcattgcaagattctgccaatactttaaatatatagatatataaatcctgaaagaataaagtaataattaaaaatacattttaaaaactatcaacaaatgttatattgataacaaatttggggttttaactgatggtgatatataaatagaaaataagtaaattgtcagatatatatgatctgcagaaagatctaataagcctaataaactttaaaatgaaataatatgatatgagccaacatttggtttgcttttgcaaaaataagagcaattcttttatctagtttatgtttgtaaatatatctaaaaccacatcacagtcaacatttaagttatattgctcaatttggagtttttattttaattattgaatcccgacttgtatttttataaagtaaacactttgaactgttcacaagaaaaatggtttactattatatatttatttgaaatctgaaataattttagttatttttattgaaatataaacagatcatagctatgtgggtcaaatcatagtagtatgtgtcacaatatagagttaagttgcatcagttattaatataatattataaaattttggttacttgtgagaatttcagatagaggaaaacactatattcaaaagattgtctgtgttgacaaacttctttgatgttatgccattgtaaacatcacattattagcaaacaatgttcacaaaaagtgaaattagtactgtgctctcttgcaattctgtcctgtcaggtaaagaataaacattcaaaagtaggataggtttttgtcctgtcactaattacaggtaccctgctaagttgcatgttaagtaaaaacttagaatgggctggacacagtggctcaagcctgtaatcccaacactttgggaggccgaggacggtggattacctgaggtcagcagttcgagttcagcctgaccaatatggtgaaaccttgtctctgctaaaaatacaaaaattagctgggtgtggtgccatgcacctgtagtcccagctgctcgggaagctgagacaggagaattgcttgaacctgggaagcggaggttgcagtgagctgagatcacaccactgcactccagcctgggtgacagagtgagactccttctcaaaataaataaataaataaatataaataaaaacttagaatggttatatccataagcattttctcccatgaactgggcaggcagcagaatgtgggcatttgaagcagcctgcccagatggcactgttacttctccagaagcacatggatcctccatggcttattgctaagtcagtgcaatcaatctgtcagttgatatctgccagatcagtctaatagagtttccaagcattccatcaacacaaggctgagagtggggtggtgatgtgggatacgaagcaggggcaaactgactctggaggttcctgaaattagaaggaaaaggattattgatcactggtctgttcaaaccatctctctcccactcctgccttattgaatcagtaagaaggagaaccatgagacagacctcattcaatgacaagaataaacatatactacatcagtgatactgtcacttctattccttccttgccaaggagaaagaaaatctggaatttttttaaaggatttggacaaattataaaatggtcttcacaacagaatgataggctatttcctcatggaattagaataactaacctaagcgatggtcactggaatagaagaagctgtaagaagaaggacgtctaccctctggtgcttaaaaaaactcctgctcaaaatctaataatttcttgccccaccatcaccgtgatacacacaaggagtgagggcctctacttcccttttttatccccttttttctatccctgttgtgaaaagtcccttttttacattccactgtaagcctgctctgggtgtattttcattgattctagagccctcagtggagaagagagtttattggctttgaggctgtaggactggctgtgctccttatcccccttaaggggcagggtacttttgggatataacttgtaacagactggctgcccatccatctgcccatctctggaggtgtctaactaaatatttgtatgacttttgtattttatgaatttcactactagtgacaacttatttagcagcaaaagtgctaaactagacaaaagactttatcaaaaatgaaaatacttttttttgcaaaaaaatttaaagtgttaaatatgaataagggtttacattttgttctgtgtgtagcgtgcataaactgagtaagaatttccataacagtctctttttttactctaaatctgcatgagaatggactgtagagctattctgttgagttaattataccctaaaatgtttagtattgcctcttatcaatcaagtttgcattttcataaggtatttttgatgactgaatgatttaacatacgcaaaacacatctggacactacttggcatttagttaagtgctcaaaaatattacttcttttcctcttttatcaggaaattatttctgccctcagttccaactctgcaagtgagtctcttagattcatagaaaatactcaatgaccattagccgttattctttttgtttctctattctgtattttcttatgaagtagctttaaattttcataataaagaacaggaaatgaaaagggcatttctaaaaccaattctacacacttaaagaaaagtagagagttaagacaatatagtcaattcaaacacaccaaaacatttaactcagaaatatctccctaattctttctatttttcagaattagccagatggttcaatacttctcggtgggatctgagaattaaaatgaatgtcatgtagtaccccctaaataaatgtatgctgactgatagataattgcatttcttcttcagatcacacttcatatatacatatagattttttttgctgtcagctgtgaaaggtcctaccggtctgctaataattgagcaagcatgttttagtgctgcatgtatgcattgaaatgaaccaagtgtaattataggcctctccctttgaacatcaaagggcacagcgctgtcaatatgcccgcatcaagccagcagcctaatttactatttaataatacatttgtgtgtcagacctctctttgcccagggctgttacagttcaactagttcctctgctgttaaaaaattgatcatctttctttcctgatatttggaaaaggaacaataaaatttatctctgtcaattgaaaggtctgttcactttaaccttgacctgtttatttcagaagtgtaagagggcttaaacacatgaagaagcagtaaagtaaaagaaaccttaaaattagtgatttaggaaatagctgaaagtagaagatggtttctatacaaaacatttgctctggagtgatatctatacaaactgggtcacaaaacctgacttttttaaagtgttgttgaaccaaatacgttagaatctcttgaaatgaatcagaatcctgggtaggaggaggctggagctggacaaagaggaaagacaactgggaattttgcattgggaacgatcttcagatgattctaattcaaactaaagtttgagaaccatgttgctctaaatgttttagcagctagtacaaaagggaagacatgttttattccatgattcacgaggtagaagagaattaattcctcagaggaggacaagaattcctatgtactaaggccagagataatttttctctgggtgcttcggtggtaatataatattcattaatatttatcttttcagagaaagttttttgtaataattggaactcatagttattggttttgatgtctagaacaggtaagccatgccatagaagtgcttcatccacattgtagaagcggggatcaaggaaaaaatataccaaatatgcaatatttggtacagagattctctctgtacttcttacatgttagatgactgaataaagcccattactttagcaccttgtttgcagtgttgttttctgtttcacctactctctgtttttctacaagcccactcttttcatcgggagatgaaagcattcatttgagagagtagggaatttcaagtgaggttagtctgtgttttcctcaatctttgggtactggcagtcctgttggccttcctagctcctgttcctccagtgatccttcttccccactcagttcttttgcctcatgagctgcagtgcacagagctccttttccatttcatcatcagccccctgcctgaaaggcaactcttaaatgtagtcacaattcatatcactgtcatctagaaagtcaaaatcaagaaattccttcctggctataatacctgtctctgccactatggtttttctagtcaggcacctgaatagatgtttatcatcctaattatgactaacagtctttgtggttctttccagttctccccatgtatgatccttggctgattttaaatgctttctctagctaaaccctgtgataacttgcatcttgaattccttgcccctttgtattgttttcaatcttgggacatgagaaacagtactgtggctaattggcatcactgattaactatttggactgtaaggtggagctcatcgctgccttcatgttccagcagctctttacctttactgctgtcatagaactcagcccaccagtgtgtccttgttatatgtatggcggtcaccctcagtgttatgggctcccaccctccctgaacagtccccagatattgcctttgtatcttctgctacatctggcacatagtacgtcctgaataagtgtatcttaattgcatcttattgagacatttggccatgatgtacttattttctatgaaaatgtctaaatatttgtttaattgaatagttaggcttgtaatttattactgtgacttatttgtagtgttttaggcaaccagaggtaaaggacatagattaatttaagaaaatacgaagtttggcgaaggaaaaaattaaagggtcttttattttctgaagacatgtgtaagttccttgtgattataatttcacgtctgtttaacttaaaatagtgttagatttagtttggctgggtccagtggctcatgcctgtaatctcagaaatttgggaggttgaggcagaagggtggcttgaggccaggagtttgagaccagcctgagcaacatagtgagaccccatctctacatacatacatacactaaaaatacagatttagtttacagaattggaggcttatggtgcctgaatacaatgtatgacattttccaatctacaaaatgttaacacttcaaacaaaacttttaaataatacatgcttattataggaaattggaaatgtgtaaagaagaaaaggcatcaaaatctcaccaccaggagatagtctgtctaaacgttttgatggatttgccttatttttctgtgattatttttaatagatgagattctacgtgaatatacttccgtgttttgctgttttcacttcatcctgcatgttcctgacctcttttcccagtttgtgattccgtagagattcagagttataaataatgtgcataaaactacatatatttgcataatcacatttttgtgaccaagctctaaaatgttgcttttatatagaatgaaagttcttgcaaagttttacttacaagtgaacctttaaggccattacagcttaaaataaaacagtcttaataccgttttgagagtcagtgccaagagcagtgtttttcaggaagtaaatgccatgacctgcccttttttcacactcaggctcttaagcctcctgagaaaaattttaaataaactgtcacctttttccgtcctgtttggtttaatgaggtgttagatggacacaacttggaactttggagacaatcaatgatggaagaaaagactagtttgtatcattgtttggatcaaaagctcccaagtcatatgtagtcattttctgatgtactcttctccagccatgagggcacctgggaacacaaactggcagtgaggtagaaaggagtgcagctgaatcaggagagtgatggtggtgaggcgtattcagaaaaactaagacacactctacctttcctttacatcctactccagggacttttttaaaaaaaatttctttaatcctttggattgtttgaatgctttcttatgagcgttacttattataattattaaagagattaaaatttaatgatatatacttaacactgaattatatactttaaaagtgtaaagttttatggtatgtgaattatatctgagtaaaaataaataagggaaaaaagaggtggaaagccatatgaacccattcattcatgtaaataaacactaagcgcctaaaaaatattcataaacctgctttggtagttgcaagagtgaaacacacatagactattcttttgggagtttatagaaatatgatagaaatagaaatatgatgtatatctaagtaattctagtaccagaaacaaagtggtgtgtgttactaaaagaggtatagataaatttctggggaaaagtagaaggaaagagtaataattctagcagcaaatgtagaaggaatttagaagacaggtgtttgagtgctgattgagatttgtgaatcaatgtagactggtcgggtatgtgggtagatttggtggtgatgaggcaggggagcacccatctgattgctcacgctttcttggtgaattataggcaagacttcacctgaggctgcatagactgggatagtggaaagaagggaaatgctatgaaagcatcctttggagagttggaaagtgtgcatcttcggaaatttcaagtgaggataatttgtttttctcgagaccctttcagctgctagatgtaaatgcagagtagaagaataactggatataggtagagttggaatttatgacataagtataacaaaggattaacaggctaggggatttgagaatgatgaacgtgatggtagcaatggtttggggaagtaattttcaaagcaggatcagcatcacctgaaaatttgttggaaaggcaaattcttggtcctagacctactgaatcagaaattctggggacagggcctaatagtcttgtgtttttgaacaagtcttccaggagatcctgtagcacaccaatatctgagaccctctggtttgggaaatatagagtactcacatagtaagtattattgtgggtaaggggcaggaatgagtgatgatggataataaaaaagaagcagtgtctggaataaagtctacatgagagtgacatattatgtcagtggggaattcaagtaagtgagccttgagagtaggctgtgctggccagagaggaagatacttaaaggattttggtggtagagcagttaaaagagactcagatgttgtgtggatggtccatgttgatgccactgtcaccgagaatcatgatacaggggtaagaatggagaagaaacttgtgaggccagtactgaaatctttattgaatgaacagtgaccaaaaagtagacagacaactaagtgagaattagaggatagtacagtcatttcttgcccctcttttcatcctctcccactcctcaggcccagaggtatctaaaatatgagagaaaacagcctagcctctggatccaaggtgtaagaaggttatgcctcacgtctagacttagttcacagggcacagaaaaagagtatgggacggctgagatgagaggaagattgagtcaaattagtgaatgttaccaggttagtgtggaggtaaatggccaggtataaataggtgatctgaaaatcttagactccttcttgttgctgaaataagcagataattgagacatgatgaggcgaggtgaaaagtgttgtctgacaagattagaatcagcacttttttagtaaactgaaaaagacagtcgtgaggaaatgatgcatacataccttaaacattttatttctagttgtacaataattcatcatatccactgtttgagtttccagattgttttttttttaacataaaccacactcatattgtcatctatgaattccaggctttcaagtaaaccagaactgaaagacacatatgaagaaacccaagggcaaaatctttctagacttttacttctctcttatccctaattttttatggttgtgttacccacacaacttttaaaataactcaacctttattggctttttccaaagcatgaagttttgtttttaatgcaacaactctcttttagtattttatgttttgttgctttatgtaacatttgattgaattatataattacaatgacaggcataaacaggtttgggaacaatcacatgtaacctgttatacatacaattcaacaaatgggaaatgtgagcctatgtgaagtcccatatgttcaatgtccagtgggcatgtattttatagaacgaattaataggtcaatgtggcaaattggtgaattagagttcagatgagagagcttacttcattgttctccatgatgcttaaaggaaagtcagtgatgtggctgagcgaggtgagacaagtaattggtctttcctgaggccgccagaggtatgaagccagagtgagggaactcacttctgaggcagagggtaggtcacattggcaacattggcatatgtagaaatcccttataagttccattggcacattttcttctttgttcttccaaaaagactaataaagttatttaaattatgaaaattattttctaatatattaaatgtgattaataagtaaactttctgcaggtttctatgatttttgtatcattgcttgatttaatggtagtatgatacaattgactagtatgttagctcaaatccctcgtatgaaatatgtgcaattgtgatttctacttttctaacttttaattttggctttatgtcttgcatgttataatgtacaaagaggatttctcagtgtaccaaatacatgaaaatatgtttgaaaatttcattaattttttaaaaatagttcttaagatgtttgtatcttgagtaaaacatttttctattaaagctattgatgtattttccatgtgatgatgattaggccattcttgcattgctacaaataaatacttaagactgagtaatttacaaagaaaagagatttacttggcttatggttctacaaactttacaggaagcatggtgctggcatctgcccagcttctggggaggccttgggaatcttacaatcatggaagaaggcaaagggggagcagtcacgtcacatggcaaaagcaagagcaagcgcgagagagagagagtgcagggtgaggtgccacacagttttaaatgactgtgtcttgtatgaactcactatcattaagacaggaccaaaccatgaaggatccaccccatgacccaaacacacccaccaggcctcacatccagccttgggattacaattcaacatgagatttgcatggggacaaatatccaaactacatcattccacctctggccccttccaaatctcatgtccttctcacgttgcaaaatacaatcttgccttcccaatggtccctcaaagtcttaactcattccagcttaactcaaaagttcaagatctcatctgagacaaggaaaatcccttccacttttgagcctgtaaaataaaaatcaagttagttacttccaagatacactgggggtataggcattgggtaaacaaatattctcattccaaaagggagaaatcagccaaaagaaaggaagaaagggggtacaggccccatgcaagtttgaaacccagcagggctgtaattaaatattaaagcttcaaaataatctcctctgactgcatgttccacatccagggaacactgatgcaagggctgggctcccaaggccttgggcacctttacccttgtggctttgcagggttcagtccccagggctgatcccatgagttgaagttgaatgcctatggcttttccagacgcagggtgcaagctgccagtagatctaccattctggggtctagaggatggtggcccatttctcacagctccactaggcaataggggactctgtctgagggctcaaccccacatttccccttggtacttccctagtaggggttctctgtgagggctctgcccctgcagcaggcttctgccagggcacccaggctttctcacgcatcctccaaaatcttggcagaggctgccaagcattcttcacttttgcattctgcatatctataggcttaacaccatgtagaagacagcaaggcttatgccttgcaccttctggagctgtggcctgagctatacctaggcaggcccctttgagtcacagctggagctggagaggccagtatgtggggagcagtgtctcaaggctgcacagggcagtaggctctgggctggcctacaaaaccattctatactcctaggcctctgggcctgtgatgggaagacctgttgtgaagttctctgaaattccttcaagactttttcccatagtcttggctattagcacctggcttccttttagttatgcaaatttctctagcaaatggttgctccacagcatgcttgaattcctctcccaaaaaagcttttttctttttctgccacatggccaggctgcaaattttccaaatttttatgctctgcctaccttataaatataagcagcaactttaagtaattccttttctccctcatctgaggataagctgttagaagcagacaggcgacttcttgaatgctttgttgcttagaagtttcttctactagatactgtagtaatcaatctcaagctcaagctttcacagacccctgacacatgaacagacagcagccaagttctttgctaaggcataatacacatgacctttgctacagttcccaataagttcctcatttctacctgagacctcagcagtctagacttcaccgtccatatcactatcagcattttggtcacaaccatttagtcggtctcttaaaagttccaaatttttcttgatcttcctgtcttctgagccctccaaattcttccaacctctgcccattacacagtgccaacgtcacttccacattttcaggtatttttatagcaatgcttcacccctggtatcaactttctgtattaggctgttcttgcattgctataaataaatacctgagagttggtaatttatgaagaaaagaggtataattggtttactcctatgtaggcttttgaggaagagtggtgctggcatctgcttagcttcttgggaggccttaggaagcctgcaattatggcagaaggcaaaggagaagcagacacatcacatggcaaaagcaggagcaagcagtaggagagtgggtcaggggaggtacctcacacttttagatgaccaaatctcatgatttagcaccaaaccttgagggatccacctccatgatccaaacgtctcccaccatgccctacctcagcactggggactacatttcaacataagatttgggcagggatgaatatccaaattatatcagatggaaaatatgatgtattttttgagaagaaattcaaactactgcataaaggtttagaagattgtaaatatagtggtaacccatcacttaaatggttggctgatattatttctgtaaacattggaattcacatgtttttaaatgtaagttcagtgtatctttccacaagtccatgacctgacttttaaaaattaggtttgtggattattctgatctaaatatgtcatcttctgccctatgaaagagaatatagttattgcctaaatttttctggaactaacatttaagtggatgcccttgtgatagttattgatacggtttggctgtgtccccacccaaatcacctcttgaattgtagctcctgtaatacccacatttcatgggaaggactcaatgggaggtaattgaatcatggagggggggttccaattctgttcttgtgataaggagtaagtcttttgagatctgatggttttgtaaagggtagttcccctgcatattctttcttgcctgccaccgtgtaagacatacctttgctctcctttgccttccaccatgattgtgaggcctccctagccatgtggaactctgagtccattcaacctctttttatttataaattacccagtcttagatgtgtctttatagcagcataagagcagactaatagagttatccttgtttttgagtatacaaacagtctcccaataggaaaatataattatttttagttaaaagaacctcttttaatgtaatggcattctaaattctctgtagtcaatgtactttggcatatggtaccaaaaaatatatatatttatagcactaggaactaaaagagctaaagaacataacttagataatggaaatctttaaggtcttacagtcaataaactactccatactttctcatgtaacttgtcctatatcacaatatgaatatggcctataagactgttgagtaagtcagcagttaatttgtcctacttagactggctcttgtcaggaagagtatgttccatatcccttttatttatgaaattaacgtctttatagtcccatgccagaaaaaaattgtctgtattatgagctgatacattttattttgtcaaacagttaaaattttctaaaatatttactattttgccttggctgccaggaattttagagctaactcatagtgtctatgtcactaaggttttcatataattatcttcatgttctacctctctattatcagtctttaatttttaatttagtaagtctatcaggtgttttttaatataattattcttaatttcttctcaaaaatttacggtagataaattcaataaaccagcagacaattattttactgttaattctataatgcaagtaatagtgaaaaagatagctttttcagaaattcctaggaaatgctttgttcaaataggaacttagtagatgtattttgttaagcatatgaagtattcatgtttagtcttttattgctagttaaaagtcagcattaggatagactgtcatttccaaagcctatatgtttctgttttgtgtgagtcagatttaaaattcaggactggaagctgagtgtcacataatctctaagatagcaatgcacgtagatttccggccttggctgttcttaaatgtctacagagagttgcaaacctttcaacttcactctggggaagagatggtatgtgtgagatgaccaaagttggcccagggaatctttgaagaagatgatagtttgtctgatagatattataaaatgactttgaaaggagaaggtatgcctgctttgagtctaaaaaggaaagaaagcctttttcagttgttcatattgttcttttatgcataagagggttcccttatgcctttgtgcaacttttgaatgaatacagtcccttgaaaatgcaaactactgcataaaggtttagaagattgtaaactcagtggtaggtagcccattacttaaatggttggctgacatcattatttatgaaaacattggaatgtactttgtaattgtaagttaaatgtatctccccataagaccatgacctgacttttaaaattaagtttgtgaatagttctgacctaaatatatcatgtcctgccctgtgaaagagaatgtagttatgcctgatttttctagaactgattaccttttaaatagatgtccttgtctttcattccttccttctcattataactgttggcttttgcttattttactgcttattagtacgtttactgtgatagccagaataatggtccccccaaggacatacaaacatcctagttcccagagcctgtgaatatgttgcattacatggcaaaaggaaattaaggtgcagactgaattaaatgtgctaatcagtttaccttaattagggagattattctggattttctgagtggagccaatatagtcacaagggaggcaaagcaaaggtcatagtgaagtagcatgagagggacttgacaaatcattgttggctttgaagactgaggaagggggccaccagccagggaattaggagacctctaaaagctgcaaaagacaaggaaatgatttttccctggagcttccaggaagggacagagctctactgacacctgtgatttttgacccccaagtgagacacttgtcagattcgtgacctacagagctgtgagataataaatgtgttttgttttaaagtcactaaccttgtggtaatttgtcatggcagcaacacaaactaatatatttaccagggttagagaaaggaagatgaaaatcaaggcagtctgtacaggacaaaatttagtgtgggctgaagtcgcagctcttgctcagagggagatacaaggctgtcagtgaatttcagctcctccccttactgttttccattaatccagataatctgcaattgcctgttgccagtataatgatttgaaataggcttcagaacaatatacctttagttcagtcagcctccagttcacccacttggctctcaccagagtaatgtcttcatagaacagatttaatcctgttatttctctttaaacttcgctttgtgatttcccattgcctacaatacaaagtccaaacatagagcattacattcaagtcccctccataacagaagcttctgctatagccttacatcatacttctcatttgtatgcattctttttttttttttttttttgagatggagttttgcttttgttgcccaggctggagtgcaatggtgtgatcttggctcactgcaatcttcgcctcccaggttcaagcaattctcctgccttagcctcctgagtagctaggattacaggtgcccgctaccatgcccagctaattttttgtatttttaatagagatggggtttcaccatgttggccaggctggttttgaactcctgtcctcaggtgatccacccgccttggcctcccaaagtgctgggattacaggtgtgagccaccgtgcccggcccctcatttgtatgcattctgtgttcaatcaaggtgaagtacttatgtctgtgaacccagcataccattttgcactttagtccttcagatgtgtcatttcagtgacctccagtgccctcccagatcgtcagacctgctggcaaacctctatgacaaggcacaaccctaacattaattccctggaaaatcaagaaatattctacagcaaataaattatttgctctgtcctttgtgcctcactgttgcttttatgtgtcgtgatattaaaatattgtctttccatttcattcttttaaattaaactatgagcttcttgagggcagcaacaggatttaataacatatctgtgggatcttagtaattcacatagcttatacactaggtacttaataaataaatattcagtgtacaagtgattatgttacctaacctggacagaagacacggaggtgctattagaatgcaggtttctgaatcccaggtcagtttttggttacattctgactctataacttaagtacctaaaatactttgtatagctatggaactttttttcattttaaataaaatttagacaacttattctgttttatactactctcctttctatcccttcatttaacacttgtgatttcattgttttattttattgaaaatgaaagcatcaaaatagcttctgttttaattttcccctgcctctatatggaagaattattttgcacaatataactattcttattcttaaattattgtgaagattctgaaacttagtagcatgacacatgtcaaattcttttggctttaaatatttgaattttctttcaatatttctgttttctgcctttttagatttggtatttatgttaatttcttagtgattacatgtaaggtttgacattgccatacaggtctttatgaaaatgtatatggtagaacttggaaactataaaacactgcacaaatggaatgaattgttttcataattgttatcatcactttacactctgactgcaaaacattcgcagttttcatgatgatgggagtaattccactgggaatttctctttttgcaacagctgtcagaattcagtcttaaaatggttggcagctttttagtgtgatcagtaaaacacatccttcatgctacatagttaatttataggtttggtttattaatttaaaaaaggaaaacactttttttcaagatgaatgagtccatgttggtattaaaattttagataagaaccatcatcattagtttaaaaaatagtagacagaagccattgatgaatcaatgagacttaaacgtattcaaaacagatttgatttttgaaatattatgaaggtattgataaatattcacaaactgtagatttttaactatggaaatattcagcctgatttaacatattgcttggatgaccactgtctgatgtgagtaaagctaacttgttttagaatggcttgaaaagctgggcaaagccatggttcagaatgtgtatttaagatttgaattctatcacatttcatcagtgactcaccagcagtattttgttttctttgttttcaggttaactttaaaataatcagctggtttagctattaatgtttccaccagaaaagaaatgtcttgtgataaacttgtcatccttaaatgtgccagacatatcttccattgtgcatcaacaaactggcattatggtcttttaaaagccagtctccagtgagttcacttagcacgaaatgagtctacagagcttaatcatgctagagacttagctcaccagagtaccctttttcgggaaacataaatgattctcatgggtcccatgtcagtttctcatctttttacacaatgctagatacattctgacactgtcttactcattgtgtcttttttgaggcgttccttcacttgtcccagatttttaccactatattacattctcttatggcagtcttttaaggacattaattcacagtgaatgatgacttctgattcattccatggacttgcagcttaatataacataaccttattatgtggccaattaaagtgatacagttttagtgaaactaccagctgccactgtccctagttgtgggatgtgcatcactttggaagctttcaaccttatctacttgctcaggtgccttttcttgattatacaaactccaaaataaatttatttgaacatagtctttatattgtgatcttttcaacagcttgcatgaattcccacgttaatttgatgttattactgtagttctccttatatttttttcaaattgaatacatctttttctatcaaaataaccctgtttctttgggtaactatcaatagcaattgttttattcattgctttgcaggtactacagtgcaaccattctgcagatgtctggtgttgaagatgatagacttgcaatatggctggcttcagttacagccttcacaaatttcattttcacacttgtgggagtctggcttgttgagaaggtgggccgcagaaagcttacctttggtagtttagcaggtaggtggctggataaagaattcaattataaactttatttcctaataacttcaagtttaaccttcaaaaatacaatacttacaccacttctaatattggtttctcagccaaacaacaaaaaaattagagttcttctagaccaaaaaagaaaaaaaaaagagcttttaacaactgttacgctacgtgactagaaactagaatgagtagaaacaaactgcaagaataatttggatctactgagggtaacatttttctgttacttgagttccactcaaaggtacaaaagtgaaaaaaaataattgttttttttttctatccttttttgaaaaactaaaaactttggattcagaaactcactttttaacatatatttttaaatttgacatacaatggaattaaatttggagcattttttcaaagctctttcagcagtggaatattagaaccatgtaatttcttcacaaagcagggacaaactcttttgtgtttgaaacaggcctaaattccagggtaaattctggttggttaaatgtattttctatgatagcaaaataaagcaaaaccttttttttaattcccaagtatcttttgtgtttaaattctgcccattttatttattatttcactgtacacaaggactgtttcattgatagaatgagacccacatatttaacattgattttacatggctgcatggtataattttctaatttttttcaaatatgcaagtacattcctatgtatcaattagctatactctaataactcctttataagtttatttggagtgagaatgcatttttccattaaaagatagtttccagggcagcattaactaaattctattttaaccaaattgtatcgaaaacattgatctaatagaactgtttcagtcactcatcccatatttgatgagaaaatacattctaagttccaaacccagttatcagaaatacataccctctcctgaccctcattccagaatgaagagtagaacgctttcacctcctgttcttgcctaagcagtgggagcccttgaatccaataatgtgtgctgaactgcagtatcagtgctggagggaaaggtgagagattgtctgattaaggggcaaacatgattgccaacagccaggatatatactgaactaagacagtaggtaaatgaataaaagtgagggacaagtaaaggtttcaaaaccatgtttataaacctgttgaagaaaccagaggtatatagcctggagaacagactaaaggcagaagcctaccaggtattttattttagcagatagtagatgttatgaggacacagatttttacttaatataagaaaaatatccccaataatcagagctatccagcaatgaaatggactgaatcattaggatagtaaactctcaacgaaaggatagattactatcaggcagtgatgtgttaaaaataaatttccacagtgggctggaaattggatttgctgacccttgattttcagatgaatgctaagaagagataatagctgcttttaaatatttttaatggatgacacccttctttttaaatagaactccagtatattgctacctcaagaagtctattttttaaatagaacttaattgcttcttcaatttgggatttggcctttgagatctggggaaaactgactaaacattatttctagcaacctgtgttcgttccttcatttggtattccagtaaaacactttcttatcagttctgtaggatttttgagcccttattgatacagagctccagactgtttggatttgaatagtgtgactttgggcaaggttctattttctcatttgtgaatggggattaattatcatccctacttcacagagatgtaatgaggatttaacacatttacagatgtataggatttcaaatactacctgacacagagagtaaagggctctgagcattttagctgtcacagcattattgttaccaaagagtgagcctttgttgcttgaacaaacttagtgcaaaagcagcctccatcgtcataatctaggaatcttcctgaactcttctggcctatgtcatgtttccctctcagtgtaggtcttctgcccaaggatttccagagccatccctgactgttaaggggaagtattaagacaattcctcgggaaacaccaggggatttcagggtctgcttctcatgagcaacctataggcacttttctttcctgccttgttctctttgcagctgaaacccaccaaggcctcagttctgcccactacaaacactgtacagtgattccttagcttgagagacacagtctatttgatttccttattatgtggccaattcaagtgatacagtggatataacaatggtttgagaggtggaagtcctggtttcttgtcacaagcctcacaggtctcctcttttacctgtacacatagtaaatggtgccattcatgtggttctgctgtttcagtgattaaataggtcctactagaagataatgaccaatggacctttacaccttcagaataagaagtaccattcaacaaccttgttaacacattagtattactccagtgtgaccctcactcacaattgatttttctttcacattcctatactgattctgtgttagttgtatttttatttcagtgtgtttttgttttattcatttatatgtagatatatacttgacattttaatagtactaacatacggttctatgttaaatttcttaaattggctatagcctcgaatttttaacctttgattcagtatcgttccctattttgtgttcttactatgatttattttattatattggactaaaaatagtgaaaaatgttatatcaagatgattttttgttagatattcattcttttaaaatgattacaaataaaaaatatgtaagcctggacaaaggaactctttatacaaagaagtacaaaatatgtagtccatgaataatcttaaatgtaggacatttttggtgtttgactttttgtattttcaaagcttgttcagagaactggacttttctggtaaatattacaaatttaatgacaaattcttgattctttaatattggaagatttggatctatgtagctttattggtaatgaatcagaaagccagaaagattgtgtttttcccccctcatgtattttggtagtgtaatatttctgaaaacttcactcacagacggtcttcatcacagttgccaaggatacttattttaaaacatggattattgggccttaacccagatctactaaactagaatttctgaaaatgagacttgaaatatgtgcactttagacacattccctaggtgatacttatgcacacaaagtgtgagaactactgctctggtagagtcatgggaagggaaattattttgtttttttgagtatttactaataagccaaacactgtacctggtactgattattacaatagatatttttaataatgctatttattcagcacttttcacttcctgtggagaatatttttatttgccaaattatatcaaaattccaaaatctaatactgtatttggttaagagagactcttctcttgaaacataaagaacatgccaaaactacacagtacaccagataaaattctttcatccaaagccttcttgtattagactcaaatccaggttgtaataatgaataacttgacaataaccagattgattttaaatactaacaagggactgataaaacatctgtaactaactaaatataagtaaaaaggtaattcaagttgttttatgctttaatagtgtatatgagtagatgataggactaagtgattacttaaaaatttattttataaataaagtcgtttaagataccatttccttcttgtaaggagcttatcatgtcataggggttttagccctgtcttggcatcataaccacttgtggaaagctttaaaactcagatattttgtactgatcttctggagactctgattcagaggttggggtacatccaggcatttgcttccaacaggaagccaggattgagaaacatcactatatataataacaaaagagtataatgctggcttttaaaatattttcctccaaaatgggccaaaataaaataaatttggcttaagaagagttaacttttacctatttaggaattttctatatacagaatagtttatttctcataatttttaggttggttggaccttaagagatagatgtagagtcatattatccatattgcagagctctcatttaggatagttgtaccatactaacctcatgactgtaattggatggacttaacagttttttttttgtttttgtttttgtttttttcaaaaatagccaacattgcgaaaatgtatagtatggtggcccatccattcaaccaatatttatttgaatctttatatgccaggcactagaattggaccttactggatatgtgctaggcataccatcttagagtttatcattttcatggagacaggttatttaatgagtgttatgaaagaagagactcatctttccttcacatcttaatatatcaaagtttcctgatttaaaaaatcttacctgttgcatggcaataagatatggatgtaatttgggaaaatagggactcagattttttgatggacagactaacagtaaatctcatggttcgttttgttttgttttaggagagaggtatgatcttcataacagacctattatatctcttttctgttttccaatttggggcttgatagtcttttgagaaaagtaatggctcaaactattcctagttctggtttgaattttaagccaacagtagttaaacaaactgtgattttagttttatcgcattattggcctggttttgcaaaatagacttctgacctttctttaatcctccccatccttcaactttgttctgttattttgaaggcttgctgtggctgctgctgctgctgcttgtaataataatcatagcataataactaacatgttatagcattaaaacatctttcggccgggcgctgtggctcacgcctgtaatcccagcactttgggaggccgaggctggcggatcacgaggtcaggagatcgagaccatcctggctaacacggtgaaaccccgtctctactaaaaatacaaaaaattagccgggcgaggtggcgggcgcctgtagtcccagctactccagaggctgaggcaggagaatggcgtgaaccccggggggcggagcctgcagtgagccgagatcgcgccactgcactccaaccagggcgacagcgagactccgtctcaaaaaaaaaaaatctttcaaatacattatgacatttaaaattcactgtaagcccgtaaggtgagtattttcactaagccctattttacaaaagacaacattgaattatggaaaggttgtgtcctttatccaagatcacagagtcaggaaacagcaaagctagctaaaaactacagtcatctgatcccaaggtcacctctgtacccataatgcctggcttcacacacctactatgtcttaaacaaaaacatctcaactattatataaccgtgttgtacttccacgatgcttctcaatgttctttttaaaatctattttgaatatttttgttcataatttaaattccctccaagcttaactaataaaaccttaactactactaaactgccctcctaaattccatgttttaaacttattttgtctcattcaaataagttgtacaaactaacacagccatattctcttttttaacttttaatttcaggggtacatgtgcaggctcgttatataagttaacacatatctcagaggtctggtgtacagattattttgtcacccagataataagcacactactcaataagtagttttttcatcttctcctttctcccaccctctacccccaagtaatccctggtgtctgttgttcccttcattgtatccgtgtgtttttatcatgcagctccaacttttaaatgagaacatgcagcattaggttttctatttctgtgttagtttgctaaagatcatggcctccagctccatccatgttgctgcaaaggacatgatctcattcttttttacagctgcatagtattccatcatattttctttctccattcttcccatgacccttttcgtttaccctcacaatgtctgtggctcaaacaatagtcagaaacttgaaaaatgtcttatttgccattaggatgtctataagggacacaaaaattattcttttaagtgatatacttaatcaccattcctatatgttaacaccaaaacaaatatttcactttcaaataccaacaggaaagaaaaaagaatatatgtgatatattatttctggtactttaaagtcttcaaaaaatgctactccattttaataaaacatgctctttcaactgctttagaaataactcatttgttaaactaaaaaggtttaccaatttaagtcttacatgattgaatgtcattagaagaattttcttggcaccaaaaggaacacttgatggaaatctattgtctttcgtgcttcttgatatgttaggcactcaataatgttgtcacattaattgattttgagattttcagcaatactaggtgtgcgtggtttcttttaaaaaatcattaccaatttactgtttggctagcaaatgtatttgctttgaatttcactctcatcatgtctcacaatgaacgtgctagtgaatagttctgataatttgtttatacattgggagtactttttaaaaatccagtgaagatagagcacggtatttttttttcaggagtttttgtttgtttctttgttttttggtttgtttttaccaaacccagtctgccttaaaacaatattgtcaactcttctctaatataaaactttttttttttaaggtaccaccgtagcactcattattcttgccttgggatttgtgctatcagcccaagtttccccacgcatcacttttaagccaatagctccgtcaggtcagaacgccacttgcacaagatacaggtgagattccattatgttcttcttcctttacatgactctggtaacttttttgcttgcttttaacttttttaaagttgtagagatgagtaggagcttgctgggcatccaggcttatgtaagaagggaagaaaatgggaaaggtggtagagaggggcccctaggaagaggaatagcttgtgcagatgtgtgagtgtaaggaattaaggagagagtgggttgttagacacaatcttggtgatgtttctctggaaattaaaattagggattgatactgaatctaagcaggaattcagaaaagctattttagatcatatacaattcagtcacctctgtgttccaagcaaagtaaataactttaatcagtaatcaaacttttacaagatgcacatgccctctgaatattctgacaatttggactgatttgcatggctatcctcttattcatttaaacagaaggaaagttttccctcagtactgaggctctttcagaggatcaggaagtaaaaagtgatggtgaaagaaaacaaaatgttctaatggctagctgcaggcctaagagctcattaaatctaacagtgtacacactatgtgataaatagatcgaaaagtagataaatggatagatggactgagaacacataaatgaaactttgagtgattggacacatcgattaatatatttggcagcagagcttcaaagttttaaactggactttagccaccataaagtctagcaatccctttaaaacatatagatagaataagacctagccttaacaaaaatgtatattcctttagcttgaaatagatggacgcaagtctcaaatcaatgagtaaatgatttattaactcatacaaccctatatgaaattaaaacattataccctaaactccacttggtattcatttagagcatccagttgagcgtgaatttatggtggctgttcattacaacagtgaggaagatatattggttccaaattgtgatctatgtgcctttggaaaataggcatcatagcacgacttttattttactgataagtttgtttattattggctcactgactttcatagtctttttattgttctaagaagacttaagggtgtcttcatagtagaagttaaccatagcatctttatttggacatctgcctcaattgctagaaatgcatattctacttttctttttcttgatggatattttacttatatgtttttaacacagttactttgaaaaagtattttaaaaattactgtcatttgagaatcatagaatattctccagatctaatgtctgatgtagatgtattgttcagaaatactgttaggtcaactaaagtcagaaaatcacctaaaaattattagaaaaagttctttgaacttctgatataggaaaggaatgactgtaagtttttagtgatttacataatgaaatagttttcctgacattgactttaaagtttaaataaaaatatttattgcccaagtatatctcactgcacagcagtttatgatcatcagtctgttaatccttatgatgtaaggtattatcatctaactcatattttaatattcaattttaatgaggtaagagaagtgatacagcctacctttattcttattacaaaaataagcagccatttgtgaagatagaaccaaattttaggtgtccttcgggagtcagtggatatgaaaaacaattatttattgtatgagtaacatattaggctttgtgggaatttgacagtatgtatttatagtctaagtgattttgtaaaatatggctgcagtccgcttactgggtttttatggttaaaaccatctataatcctctgctctaccagctgagcagtaattgactgtattagttattttaaaataactaaaagagtagaattggaatgttcctaacacaaacaagtgacaattgcttgaggtgatgaatatccccattaccctgatttgatcattacacattgtatacttgtattaaaatatgacatgtaccccataaatatggtccactattatgcatacacaataattaagaataaaaaccatctatatacatttcccctttccttaagacaaacaggaaaagaatcacataataccttaagatgagtgaagttcactttgtaaatgtagatagtatgctttccccatggagtgatccgtataggaaaatttagcaaatgaaacagattttaaaggagaagtagtttaatatcttagtaacatcatattctattctattagtgggagcacaaattgttcttcattttagaaagtgatatggttctgcctaataaaagttaagtgcctatgtccattgactcagcacgtccacttgtagaaatctatagaccacagtgatgagtatgcagttcattcttactagagaagatttaagaaagtaaatggttaaagaacaatgattcttcttgattttaattcaataaatattggttgcataccaggccaaaaatattgtaggttagagctccctaatgacttgagattcaagagatcgacaaccctaaataattttcaatgaggacatctcctttttagaatattttaagtttttgattgataatgtattttccaaggcctgattcaattctctggactgaatgtattaaagaatgtctttcagaacaatgagaacatagggacacaaggaagggaactaactacacacactggcgcctgttagggggcagtggtgggggaagggagagcttttggataaatagctaatgcatgcggggcttaatacctaggtgatgggttgataggtgcagcaaaccaccatggcacatgtttacctatgtaacagacctgcacgtcctgcacatgtatcctggaacttaaaattaaatttaaaaaaaaacaccttttagatctgcttttaatagataaaagtgtgcacaaagataaagacagatgcaagttgctatagaaaatgtttggccacctgtataaaagctgtcatagggtcccagctgcagctagaagaaataacgctagcatgagtatcatctgaatcatatatctttatgagagttcacacacatatttctttttttcacacccataattccaatatgaccttcagttccacactctcaaattactaatgttctattcctttcatttccaattcaaaatattttctcataagagctagccaagatttgaggaatcaaacctttcctatgtacgcttccctcaaatacttgacgtattattatttatggtgtgatctcagtatatgtaaatcactatcataaaacatttaaaagtagacagatatttcctaaagcatacagttgtagaatttcaaggtagccttgccctagggtttttatcttattcacttattatttcttcatgcatctaaatatattatggatcacctaccataggattatagtaaggataaattaacatatggaaaatgccttaaacagtgcttggcacataataagcactcaataaacattacagtcattgttagaattaataaagcctgtaatagaagatgaagttgggatgatggcactcagagaagattaccttgagaatgggatgtttgtactgagctcttaaaagaagagtggagtatgtcacacagaaagaatggcaggtacaaagatcctgcaaggcagtaaggaacgtggcaagtgcaaggaactgaaagaagatgactatggggtcagagaagattcagataagactattaagacagatcagagccaaatcatgtagagcctcagaggtttttgatcttcagtctaagaacgtaaatccatggaagaattttaagcaggggtgtgccttgaccacattttgaattctaaactgtctctgggtgggtgtgggtgccaccaagagcatgtgttcatgtagggagactggttttttacagttgtctatgagagagatgacagttgcctggattatggtggtgacattggagataagcaggtagacagattctcagtgtattaggagagaaaaatcaataggaaatttaaaataaataattaactgtggccataggaggaaggagtctttggttggttctcaatttctgcatgagaaaaaaggtggactaaatcataaaaataagatgcagcaattggaagatgtaagaccatgcgtgcaattttggacatgtggaatctcaggtgtccatgaaccaacatcagctgggatattgaataggtatttgggaaaactggcccgtagttggaggagagttctagaatgaagaattattatccatgcatgataattaagtccatagacatgggcaacatcttgttcacaactaagatctttatcaagactctagctacctttgcaattcataatctatttgtaaaccactagtagtttactaatcaattgggcagtatctctccattcttcaggcttttaatcccagcatagaatcataagctattcatgctggaaggccttaaatgtaacctaattcaagcctttcatcttacacctacacttacatcttacttagtttccttactgaggtccaaataagtcacactcctctcctagggcacacagactaaccacctattctttaggcttctcttgtccccatacagaccttccttttttagctaacacagttctttaggagttattgttaatatgaaaccaacgacacaacagcttctttttctattcctttcaaaccttgctcttcttgctttggaccaaggacatggtttttctgttaagatgacttgtacaattaggtaattcaaggaatttaatgatgcctagcatattacctctttgatacagatcttgctatattttagactctgcttgagtagaaattgacaaaagggactatgcctctagttcattatactttttctttttaatacttctcaattaaggccagacgcaatggctcaggcgtgtaatcccagcactttgggaggccaagtcaggcggatcaccaaggtcagcagtttgagaccagcccggccaacatggtgaaaccccagctctactaaaaatacaaaaaaaaattagccaggtgcggttgtgggtgcctgtaatcccagctactcgggaagctgaggcaggagaatcacttgaacccaggaggtagaggttgcagtgagctgagatggtgccactgcactccagcctgggtgacaagagggagactctgtcttaaaaagcaaacaaacaaaaacttctcaattaagagtcttaaccagggtcatctgcagaggtacttaaagtcacctgttttccctttccagcggtcagcctcaccaggacagtggcatgttgttttgaaatgctccccaggtgatgccagtacatcttccattaagaaccactgccataatgctatcacttttttttttttttttttcagaaaaaaaaaaaaaactgccagctttctttctttttctttttttttggtttttgttttgttttgttttttgcttcttgaacattgttaaaccaagcataagaatatgatcaatgtggttctttttctgtatagtgatagtttcacattttcctcttcagatgaagttccccaaaatccaaattgacaaactgtggcttcatctgtagatggtggtgacactggttttgtgaaacagtatgcccctcataaattagtcccttcaaagttcatttccaataaaaattcattttgtattcactacactgccttttcttctccttttgccagccttgtgttatttaacaaacgcatcattaacatgagcactgtaagactgtcagattcgatcataaaacttttatgcaaccttagaaatgtgtaaaaacggtcgggcacggtgcgtcacacctgtaatcccagcactttgggaggccaaagcgggtggatcatgaggtcaggagttcgagaccagtctggccaacatagtgaaattccatctctaccaaaaatacaaaaaattagccaagtgtggtggcaggctcctataatcccagctactcgggaggctgaggcaggagaatcgcttgaacctgggaggcggaggttgcagtgagccgagatcgtgccattgcactccagcccaggcaatagtgcaagactccatctcaaacaaacaaacaaaaagaaatgtgtaaaaaccctattagcccctcttttttccccagtatttgacatcctggtaatagtgtgtttagcatcagtaattcatagcatcttgacagtgaatataatattatgctgtgaattgaaacaactttccatttgtgttaaacatttttttttcttactaatttcctataaaatgaatctgtttcaatttttttggcatggtggcacaagctaatataccatgaggttactattaataatgctacagtagaaaacaatgttgtatgtgttactaatatctacagacccattggagataaagataaatgtacataagtcaattaaaaaggaaaatgaaagttggaacaaaaagtccacataaatctcatcctgtgaccttattgccaaataactgcacatatcttttgctaacacttaaataaatacccagtgtgctgaatttgacacctggagaggattctgtccacctgtcatggaaggatacaagagcttcttggaggaagtttgccatttatgggacatattctttgagttcgccataactttttaattttgatgcctaggcttttagccacagacttacaaatcccccacttggcaagacttgctacccaaaccttggttttttgttttgttttgttttcctatagtcaaaaaatgcttcttgggaagccagaaagacaagaaggaggactcaagattaggtttgcaaagatgaaggaaaagcatttcagggagagggaatatcagggaatgtgtacaggtcctaagcagggagtatggcttcttcaaagaattgaccaacaagactgggtcataacgagcaagcaagagaatggcaccaaaataaactggatagcaggccaatgacagaacatctcaggaccttatacaccaggagaattttggacattatcttagaatactgagaagccttcaaagggtaataggatgagaatgacattatcagatttgtgtttttaaaagatcagtctggctgcagagtggaaaattgattacagacagacaaatggtgatgaagggagaaaggttaaaagaacttagtagcctaggcaagaaataacgcaaccttgatggtgacagtggatatagagaaacgagatattttggaggggaatggcaaggctgggtgattagctggataatagatgaaaataaatgctttagaaactggaaaatacttagggcaagaggaatataggatccgaaacctcactgtggtctacttagcaacataattttaggcatgtaaatctggagaccctttcctttgctctcaagttaaatacaacagtcacataatgagcacagtacttagtattttctgtaatttatatccttatttgaaaggtaattttcattccttcttgaacttaaaagacttctgagaaaggtgtttctgaggttgtccatttaggtctgaaataacagaacaagataaagggggaaaaacatgtatctctgataatccatgggacttatattcttattctagaactcttcattgcagtgaacacatgaaaccaacttggagttttattcctgtttcaagtaaatccacttaaaatagcatctgcataaacaaatgaaataaactatccaggactgtgacagcaattgactggaatcagcgtctggtgtattttcttataataaagaccaagaaaaccttacagaaaatataaatatgaaacaaggcccctaaaaaacttaactattctttaattaagtttgtatgaaacgaaaacaattcagctattaacacttaaaacactctggtatgttaagttggagtatttcccatcatgttgtaaaagcacgttacataaccttgctacgtgttccttgtctgaatagtaggaaaatacctattgctatggaccaaatgtggtttatttaaaaacaaagcataggggctgggcgcagtggctcatgcctgtaatcccagcactttgggaggccgaggtgggcaaatcacgaggtcaagagatcgagaccatcctggccaacacggtgaaaccccatctctactaaaaatacaaaaattagctgggcatggtggcatgcgcctgtagtcccagctactagggaggctgaggcaggagaaacgcttgagcccgggaggcagaggttacagtgagccgagatcacgccactgcacaccagcctggcgacagagtgagactccgtctcaaaaaataaaataaaataaataaaataaagcatagcaaagaggttaaaagaacctcttcagtgaaagtaacttggaaaactatgattttgattggctgggtgtttgggtggatggatggatggatgaatggatggatggatggatggatgcatggatagatggatgaagggttgctattgataagagaaggtagatggtgctgactaaaggaagtttttttagtataattttcatcctggaacttaggtatatgtggcaaaatttggcaacaccttgttgctatccaagagttggtgatttaggaagcatccaagcctttgtttcttcaaagtttacttctactcatggctacagcatgattagcaataccttctatgggcatgctagtagacccagcagttcaagcctgcaggtctctgggcataaaacaggtcacatagtgtttaggccatccctcagtgactcttttagattgttgtgtggtgctaataagatagtgttttcctaatattagtaagtaaataaataccaaaaaatataggtcacatgtctcttcaactgtaacatccagattgtatattgattaaattagaagactagaacaatgaaataatgtatcctgaacaacctggttttagtagctgaaagtctgcaattgtgtaagttctatacagcttaggaaatcgaagaatatagtactttagaaaaaacatttatgcacatttgtagttaattattttaataaacatttttgaaagttgcagtaggctggggtattgagatttaaaaacaaacaaacaacaacaaaaaaaacagccttcctcctcatggagctcacagctatgagggagaaaaatgcagatacgtaattgcaaaacagtgtaatgaaggctgatagatgtatcagagcatgacctggcataattcatttccccagggccatgacagaaggcttcctacatgagagtccttaaaattctcattattttggatccttttatagtgttctttaactgcataaaataaattttataaaagtacaaagcaactcaattatattgaaatacaggtgccagaatacttttaaaaataaacttgttatataaaagtacaaggcaaatcaattatattgaaatacagttgccagaatactttaaaaaataaagttattaaatagtaatgtatgtacttctttattaacacattaagtaacaaatatagccgcaagtctaataccatagtttcaacaccatagtgaatgtaaatggtatttggagatttctgcaactaccttaatgggatatgaaaatatgtgacttctgttgttgccagtagtttactgcctaccttcctaactgaaggaaatgctaaatttcagtaaaaggttaatgaaatagagatgtaattttcttttcatccaagtttacaggccccatattaaggacccgtcacagaggagggagcttgatctgatttttcaatggtgagttggagtttctcagaccaatgaaaatggagaagccacccaggcatgacagcgaactgtgcaaaagcggaaaacagatttgcccttcaagaaaattataaagcttgatactgctggagaaagggccaccaggcacaggatgatgcagaaggagaggaaaggccttggatactaggtcaaggcttgagtgaggaagggaagccagtcaacagcatcaagcaaggagggtaccatgatcaaagctgagctttacaaagagttttctgtgtgagttttgggatatagattggagggagaagagtctggcagccccagagagagattgtgagagtctgagattatctcatgatggtaagcatgaagacaaagctatttttggaaatattacaaataaatgttaaaggcaaagtatgagggaaaaggcgtttgggcaggcagttcaattttatgaatactcagtgccgattatgtggccccagccaatatacctagcaggatggagggggcataattctaagcaggctttttattttaaaataataatagtttctgttaactaagctcttacaatattcaagtattattcatattctttttgaatattacctattacccttaaactttcctgaggaagatactgttattattattattattatccaattttacagataagaaaactaaggatcagacggattatatcatttgcctaaagtgatgtaactggtatgttgcagagccattttgttctgtccacctgcctcccttagtcaagctaatggcctttatttttttttttgcttatgtcaatactatccaaagcctgtgaatattgtaggaaatgctaagtatcagttacccaagaagcaaagagaagagttttaagcccctcatattgaagggctaggtatttaaacactaggattttattttaacaaaatactgccctgaaaatcaagtaccaaatgatgaaaatcactaaaacaagagtttttaatgaaattttaccctcactacacatgccatttaattgaactaacataaaactctttcagaggtatttagtggccaaagttccttatgtaacataaatgaaattctgggttgctgcacagattcctaaacagatatagattatgggattattttctttaaatttacttctgatcacttcaccttctcagcaacccagatactggcaaagtggaagatagcttgatgaaacaccaggctgtagcagtctgactaaagcttttacagatttctaggaaaattacttaacaaaaaaaaaaagaaagaaagaaaaggaaggaaggaaggaagaaaggaaggaaaaagagaaagaaagaaagaaaagaaaagaaaggagaaaaaaatgttgcccagcttagaagtgagaggactaggtttccaaatccctgctttaagaccttgtcacaattaggagcaattccctttttttctcccaggcttatttttgattttttttttaaagagtgttagaattttggggaccctgagaaatctgtcataaagatagtatatcataaccactgttatctttccaaagtattgccaaacagcacttagatcacccacagtggttcagccttctgctagtaagatgagatgcctttattttccacaaaggatatcaagccctgaaccccacccagagagcaaagaagacacagaggtagttgcttgcaagtcaacaccattctttgtgagcgtaactaggcaatggctttgttactggtggaggatcttgaatatgagttgtccaggttcttggcgttttgagcaaagaattggacaaaacatacaaacaaagcaatgaaggaatgaaacaacaaaagcacagatttactgaaacaaaagtaaactccacagaatgggagcagactcaagcaagcgactcaagagcattggttacagaattttctgggtttaaatactctctagaggtttcccattggctatttagtttacaccctatgtgaatgaaggagtggcccacaaccagtctaattcgtctcggaaggctaccaatcagaggctgatgttacaaagttataccgctatgcaaatgaagacgaggtcacaaccaatctgattggtttcaggagaggaccaatcagaggtactttccatttttcatctgcaatgcagaaagggtggaggttacaaagggagtagcctctgatccttttgttccttgagcgtggaaagttggggttttccttttgatttagttctagaagtcagcatgaatcagccttaggttccctgcctccagaccctattcttcttcttcacctagatattctaaccttttgttaccttccaagaaaaaatgattggtactagcaatgggcagccacaggtttgttatcttctgtgagtcatgatcaatgaacaagtcctctttattctctaagcaatgctaaaacactaagcaaaccagtaatttcttgacagatttgtcacaggaattttgtaagcactttacatttgttacactgtagaaagtacatgtggattttagtcttacaactgattacagtcataatttgtgtggcagtgtttagacaactttaggcccataaagggaaatctgaccagcatttctcagaacaataccagagacgggtccatctttatttctcccttatggactcagtttgaaaacacggattcatgtgactggatgtctgatcaagatgctgttatttaccatgctagttattttatacaaacctcataacaagcagtattagataattagaaatcactttatgcatcttaaccttacccagcctcacacacacctgtgttttagtcctttctaaaccacaaatcccctgcaactgaaaatgattccataacattttccaacattgcattgttctgtgatgatagggtataaaagatatataagacattgttcccatcctcagagaagtttcagtttgtacaaaagaaatacacacaattgcctattatttatattttagcacaagggaaaataatctcatttttaaaaattcttgacacagggaaatagatggaaaataaattttgaaaacttatttttaaaccatgtaggagtacttaatttgcagtgatcaatgactcaaagctcagcatgtcttaaatattccatattgctaagcagctgataatacaaatccatccttcattccgctgcttttctcttgatgtatctagcataattggtgttttcctatgtgtgtatctgaattgcatatttcacagttactgtagaaacctattactccttggcatttagcatggatgataatgttgctccttcagtaattttagcctagaccaaacatttttgaaatggtgttgtacattagggccatcttgcttatagattaataaaatcactaacctttacactaaaaaaagtgcactgctcatttttaataattatcaatatataaagttattgtcagttaagagtcagaatgcattttttaattctcattcttccttttgtttttcttcagcctaatatgatttttatgtcataaatccattctcattagtcttcacaaacagaaaagttatttcataagaagaactgagtagcgtttttctaatttgtccattttggaaacaaatgaaatatttattttaactgattagtgtttctataaacatttaactttggctggacacggtgactcatgcctgtaatctcagcactttgtgaggccaaggcaggtggatcatctgaggtcgggagttcgagaccagcctggccaacatagtgaaaccccatctctactaaagatacaaaaattagctggatgtggtggcgcacacctgtaatcccagctactcaggaggctgaggcaagagaattgcttgaacccaggaggtagaggttgcagtgagctgaaatcgcaccactgcactgcagcctaggcaacaaagcaagactccatctcaaaaaaaaaaaaaaattaactttgtggggcctaaatattcagctcttcctgatatttcatttttatcattgtaaaatggatacattattatggcgatagatatcttcacaaaaattccgtgtgatataataaacatttgaaattgaatatagttattcacttcctaaaacaacaaatcttggcctgtgtaatcaaatttggcaagaatatattatcatccttattcatatatgttttacaattatgtgttgtgctatagctaaacacataagtaaatatcaataaatgaatgtgtaaatttttggcaattaccgtatactaatgttggcacagatacaattattgttaactttattttcatgttcatataacttaagtgtgtatgttttggcttgctatatatgactagagtaaaattcagaaacctaagcatcctaagttagtattattgcttgttatagctggaatttcagtgtatactaaagtgatcttcttttcttatgcaaactaacaatgagtgccatggctcagttcaactgcagagcaattacaagaggagttaatgctatactttctttatatttatctttttaatatccggaggctgccttattttacttaatacctagattgttgaaaaatatatcaatacaatagaaaaactcataatttttaaaactcactcatctaattatgcattaaagtactaactccttttcggttccagtagctacttatggacaaatccactgactcctttattattgtggaaggcttcccaaggctgaggagaaaggagttggttggagtcaagcaggccaaagcagggaacatgacattgcagaaagagggatagcatgtgtgcagaagaaagagagagcttaactacaatttgagttgccttttcaagaaaaatgaggaaagacacagaatccatagattttaaaccataggattaaagtaaaattatatacactaataacaaaaacagaagaagaaacaatattaccctgaaagagtattttaaaaaacaacaacagagctttgaaatctcaccagaaaaaaaagaagggagtagccatataatgcaaaaagtaaggtaggatttttatgaccttgaaatattaaagccttaaaagacagagacaacaaattgaacaaatactagaaaaggctaagaaatctacacataaatgaaactcaaataaacatgaatctatgagattccaagagagacaaacttggtaattatcctgtcagagagaaattggagcaacagaaattgtagcactaaacaaagaagcttaactgctcagttactctataaggaagagtcacaaaggaacaatttaccacctcagtcagagaagcactgagttaagatagaggcagtcatgagcacctcaataaacagcctcacaaagcaaaacaaccttgacaagctagaaaagtcatcatccttgacattactgagcttctgtctcacaaataagaggcaggggtcagccattcttcagtgggtgagattaatgggatgaagcattaactctgagacttttaggtcacctttcatgctgtccaagtaacttggaggaaccagtgtgctcgctaaatgctgcattcaccaatgcacattgagtcactgggagaatcagcattaccaatttgcaatcatatatatacagatactgttagggactctttcccacttgtttttctttttttgaatttttttttaaatctttattttaggttttgtggtacatgtgaaggtttgttatatagacaaacatgtcacaggggcttgttgtacatattattacatctcccaggtattaagctcagtacccaatagttatcttttttgttcctctccctcctcccaccctccctgctcaagtagaccccagtgtctgttgtttccttctttgtgttcataagttcttatcatttagctcccacttataagtgagaccatgtggtatttggttttctgttcctgtgttagtttgctaaggatgatagcctccagctccatccatgttcctgcaaaagatgtgatctcgtccttttttatggatgcataatattccctggtgtatatgtaccacattttctttatccagtctttcattgaagggcatttatgttgagtccatgtctttgctattgtggatagtggtacaatgaacattcccatgcatgtgtctttatggtagaatgctttacattcctctgcatatatacctagaaatgggagctgggtcaaatggtagttctgcttttagctctttgaggaattgccatactgctttccacaatgggtgaattagtttacactcctaccaacagtatattagcattcccttttctccacaacctcaccagcatctgttattttttaactttttaataatagccattctgactggtgtgagatggtttctcattgtggttttgatttgcatttctctaatgattagtgatatggaatttttttcatatgctccttggctgcacgtatgtcatcttttgagaggtgtctgttcatgtcctttgtccactttttaatggggttgtttttcttttgtaaatttgctaagttccttataaatgctggatattagacctttgtcagatgcatagtttgtaaatgttttttcacattctgtaggttgtctgtttactctgttgatagtttcttttgctgtgtgcaagcttttaggtttaattagatcccacttgtcaatttttgtttttgttgcaattggttttggtatctttgtcatgaaatctttacctgttcttaggtccaggatggtattgcctaggttgtcttccagggttttcagagctttgactttcccacttttcattctttcatttggcacacattactgaatgctaaccatgcaccaggtactgcatttgtgccaggtgttaaggaaacaaagcatgagatatagcctctcatcagaagtaggaaatatcttaggtttttatttacattttgaacccgtacacaagtatatatttagagagatgttggagacttgggtagacttgctttttcagaatatattcaaaaataagccaaaatattttttaagcatttgaaaaaaatacttgtaccacttggaatcatggtaggctgtatattacagaagaacccaaaataacagtggcttaagcaaggaagaagtctttctctctctctgtcatgtgaaataaactcaagggtaaggagttggggaccaatgtgctacatctagtatcatcaggcatccaggctcctatccttttactgtacccatacaaatgtctttcataagttcaccacatgggccagggtggctgcaggagttctaccagcatagcattcctgtgaagcaagccagaaggaaaggcagaaagagcagctcttcccagctgaatcagctccctttgaagtcttcctgaaatcccatgcaatacttctcattggacagaattaatcccttggccatatctagttgtaatgtgaactgggaaatgtattcttttgtctagcagtcgggaggagggaggtggagccacaatgtgcccagttaggaatcacatttctcttaaaaaggaggagggaagaatgaatgtagggataggccactagcaatctttgctacaacagtacagctaggggatatgttaattttatgagacatttatgagtggttctgcttgacagcaggaagtacaaatcaatggaccaaatagggattcacctactttcacgatttagttctctctgtgctcattagaagtctaaagtcaactttgcaggtgacaagaaatgtggttgtcttaaatatttaactctagctttgcaaagtaaaaggaatcattaatatctctttcatttgtcctgtttccttggcctttgaaaccagtgaaacagctaccttttgttgtgtttgttcaaaatgagtgatctgaacaaatgagtgatttccttatcttttcaaaaagaatggtcacagtatctgccatttattatatagttaacattgtgtggatcactttactaagagctttgcatggattctcttttatccttcagaaagactgagatagatgctattattttccccattttaccagtgacactgaggcttaaacaaattaagtgaggctgggcattgtggctcatgcctataatcccagcattttaggaggccgaggccagtggatcttttgagcctaggagttcaagagcagcctgggcaacgtggcaaaatcccatttctccaaaaatacaaaaaattagccacacatgttggtatgtgcctgtagactcagctactcaggaggctgaggcaggaggaacacttgagcctggaaggcagaagttgaagtaacctgagattgcaccactgcacccaccctgggtgacagagtgagatgctgtctaaaaataaaaatgaagaagttaagtgaattttagaagatcatatggtttagcggacagcagaaccatgctttaactgagaaagatctttctctagaattcagcccttaaccactaccctcttcattttgaaatttaccaattaaaatgtgatgctcctattgtccaagggagggtgtaatgtaccctttgggagtggacagtaattccttatggtcaaaggtgaataatacctataaaatacctatgttgatatactttaaagtattcaccaccttggtttttctagagcagaacaatgatcttatctatatggttctgaatgtgagcatagttgaatattctaagatgaattgttgattttattttgttttgtttgggcaattgtttttaaggcctctgttacacaggtagatgaacatgagaaaaatcattgaagacaagaagcaaatacagatgagcacttacaaagtaataccctttaggcaaattggagtatatctgtacaatcatatgagaaaatgaagtccattttgaaagctgttcttttctaagcctcctcctttagttagtgagatgaattatccatgtgaacctgaattttccttgaagaaaaggaccactgtgtgctaacattggtattttgacccaccccaacaccacttccctaattcctattggtttcattcaccttgatttaattttatgaaattttgtcagtacagtagggtctagttgtgagagcaaatgattacacagagttgctggcatcagaggacatgatgctatctagggggatgccttcaagctatctcatttcgtctgtgtcacacaacacaacttccaaccaaatgtcattctggggctccaggggctgattgtttctttcacccttcagtaaaaactcactttgtcctccacattcacacatatagtttttcatgaaaatcagaaaaccttctaaccaactatgcaagaactgagaaggaaagcactgtaagttaaaatgtgtttcttcctttgattatgttgtccctgtttgaaacacttataatatgataagcctaatgccaagtgttatagtgtttgacaaaaaatgtaaaacagatttggttaccaaggttctttcttggtgcataggaagatacttgggtaacagatacagaatcattaattactgaagcaaaatagcacaaatgggtcccaaaaagagagtcaattttaagaagtatttcctcagatgcagaaaaaatatagagtgctcactttaaaataacctaacctatattttatatcaacataaagaaaatatattaaaggcaacgtgactgcccatcacaaagaatgcagatactagatattcaaatttcaagttgtgataccccaaacagtaaaaagtaattagttttggataaaagttcttatttctaaatttataacttataaattatttttaactttatcaagtggtcactttaatttttctttttattttaaaagtcatgaatttccattagtccatattaaaaactgcatagtctcttaaattcaattgatctaaaaatgagtatttctaaagcgtattctgttggagacagaatccttgtaatatttcaagcaaaaattaactacttaagaaactaagtaaatttttctttctttaggtatttctttatctttattttaatttgtcagatgagggaagaatataatttccaaaatccatgaaaagctcagactgagttgagtagagaccccacttgcttctttcagtccacttgaagtagcattgaaagctgagtgtatgactataaatccagttgtgtttaaatgagtttgatcttcatggatactaaatacaaaacactttagtcacagatacctcactttcttgattaattatttatattttatatgttatgaatgctttcttttctaaaaagaacactgagttgcttttgaacttttattttcgaactctgaaaagtttatactaaaaattagggaatatttatgggtatgctactaggtatggaaggatatttatgagcctcttagtataagaactttatcgttacattttaaaatagtacaattctaattaaagaatatgtacctcagtgcagtgcttacattaaactttgactccatagctgttactatgaccctaaactgtgaagttaaaggactgtctatctaccctatgccttgaaatttttaaaagttctcaataagtagaaaagctagtgttaggagtactatttagaaatcagcacctgttatcaggtaacacaactagttaactatattggaaggaggcatgtgtgttgcacagctttttagggacacatcaatgtttatacaaatatgaagagagaaagtaaggcttatgtaaaggagttttcagacagtaatgatgagccccaagcaaaactgtgttcttaccttatttttatttatcctttttggtaaagctctatgacctacgtgtggagtgtgtcaccaatataatgatcagtttgtaatgctttggggggaaaaaagcatactgataacttaagacatgtgccagtaatcatatactatagctcagaaccaggatgatatagaaataagttgagctggtatagcagccaggataggataggcattactaatattaaaaaacaataacaaaatctttgtggtttaaagcaacaaacaactctgcttatatctcagatatccaaagtaatagagcctccaccattctgggatgccacctctcacttcaaggcttcaagatttatcacagaggtgaagcatagagctggagagttgagcactagcaataaatgctttggcctacaactattatttcatactctcattgtatggccacatctagtcacttggctacccctaacttcatataaggaattgtattataattctctatctaccttgaaatggagggcaagtagatattggtgaacattatttatatctttcacaatgtatttgctgatttatttggggccaagattccctattattctttctgcaaaaggccatataaaattttcattctgctggctggatcactactgtaagaagtattaatgacagataggcttgtcttagaaaacatcttctcctttggtgatgcccattaaaaatgataaaattcttcaattaacaatttctagcactgatttggaaaacctgactcattctgtaccagtatcattggtcaaagatcaagtacgaaaaagtgtgcacaaacgagtctgtcagtttttcagaaagttaatataaatatcatatgtatagttatatgacccagcaattccacccttgggcatatacccaagagaactgaaagcacgtatctactcaaaatcttctacacaaatgttcatagcaacagttttttttataaaacagcgaaaaaacgtagaaataacccaaataccccatcagctgacaaatagatacatgaagtgtgatatatcctacagtggaatattgtataactgtaaaaaacatgaactactgacaaatgctataatatggctgaaccacaaaaacatgctgggtgaaagaggccagaaacaacagagcacattgtataattacattgatataaaatgtccagaatagcaaatccatagagacaaagagtagattcgtggttgccagggggtgatgaaaagtgggaattgggaagtaaaggatttattcttgagcaatgaaaatgttccggaattggatagtggtgatgcttgtagaactctgaattattgaaatttactaaactgcaagctttaacattgttaaaatggtaaattttatatgaattttatctcagtaaaaaatttttaaaaatatgtgctatagtgagtgatcaccacttttccacgtagaactttctgcctccattttactggggagtgtaaccattgcctcctactgtatcttcacaagacaatacaagtttccaaatctatcagagtgtcacatgttagtcactatgctgatcagttttctcaatggcataactttacatttcaacaaactaaaggctgagtagaaaaaatatctgatttgaagtcagagaacctttattagagacatgagcaagtctcttagctttccaagctttgttttcttcatctgtgaaacaggaatgctcctgcatacttcaccaggataccggaaaagaccagatggtacaatatatgttaaagtactttctgtatttctaatctggtcttctacttttagttttagcttattttctttatattgttcagcctgctttcctttaaataaacttcctgtaaaaatctgaacattggaagtcaacatccttaggttggaaccccagctctgccacatttcagttatgtgaccttgcttaggtagttgaacctctgtaaatctgaggtttttctgtaaaaagggaaataaaaagcctccctcatgatgccaatgtaagaattaaatgagaacatgtaattatttagtatagcctctttgcatggtaaactgtctgtgatattagcacaataaggctcatgataaaattcaccctcaaaaatcttcatagctacaaatactagtcgacttacttggtctgtttgcaaacctaagaatttcagtctcttaagtattccttctaatttttctattctgtctcttcaataatgaataatgtatattgtcaccagagaagattagttactgtttttttctctgaaaaaagcatgttgcacactaattagattatatttgtatgtgttgattatatacaaattatatgcaaatctgattttactctgaaaagtatcaagactgaaaaagttatttatacatgtatgtatatatattatgcacacatttatttacctatatacacatatgtatatgtatatagatatacatttatatacatgttatcttacacatgcaaaattacaattgaggtttttaactatgttgatcaaacattcattcagtgtaacagaaaaacacttaacccccactggagttgacagatttggcaaatacagctctctttttcttccttctccattagagagttcattggtgcattttgttcagatgaaatgcaagaaccaacccaataattcattaaaaggattagacaatcagttgctagaaattccggcctaaaataccaatatatgttaaatcgcaaaagcaaagaaaaaccattctggctactaggctaaattgctgcctttaacagtgctagagccaaatgctcaatctgggcaggagcctggttgcttttaaacagtagacctcactactataaaattttttgcatctaactcaggagtcagttgaatcttagcctcaacgtgtaaggggaagaggtgagaaatatgactcttttacagagttccagatggtcatgtatggatttggtctgagagccgtgaattgtaaggaacaattcatggtgtgattcaagcttcaatcttgttatcttcatggactgaaatggagaacgaggtgtctgatggaactacagagaaagggaactaccaaatcttctatcaatataagtgacattcattcatctcattacttactcaacaggtatttattgagcacttatgtatcaggcaacatggaaatctctaggaataaaagctgtacagggtcttgagaaggtcacaatgcagtaagggaaagcaaacacagcatgaagctgttaagaaatcatggaatgcatgataataatatgagcgttttgtgatactctgacagtatagtgatgcctctgattctgctggggtcaggaagttgcatagaggaacatgagtcttgaagcaaaggaagtataggaaagataaggtggaaagtaacatccagagaaaacaatatgaggaaaagcatgagagcatgtcatattctaaatcctgcagtctctttggactggctagcacccacggcacctatggagaaatggcaagtagagacaggcaagatgggcaggggctaaatgatgccataaaaggagtatgattttcatcctataggcaatgggaagctctttaggatttaaaaagcagagaaatctgatcaggttagatttgaggcagtgtagagagtggagtggacagagtctagaagcaggcccctttagaagactattggaagagcccagctgagagatggctgggataagaatggagagtacaaggctgggcgtggtggctggccaacatggtgaaaccccaactctactaataatacaaaaattagccaggcatggttgcacgtgcctgtaatcccagctactcaggaagctgaggcaggaaaatcgcttaaacccaggaggcggaggttgcagtgagccaagatcacaccattgcactccagcctgggtgacagagtgagactctgtctcaaaaacaaaacaaaacaaaaaaaaagaatggagagtacaggaactatacatgcttgagacatagaattgatagaactggtagctatttaaatatgaatgttctgcaatcatgctcaggtttttagattgggagacacaaaaggaacaataggtttggcaagaaagccaaagattgagctttaggttgttgagtttgagacacttggaaaacatccagataactgggcaattggaagtgtagttctggcacttagagaagagaaacaaaggaaagaaagaggtcatgggggctcagtgtattggttatagcaatggtcatgtaaagttgatatttcccagcaaagcaatgaaagtagatggcccagaacagaagcaaaggagaaagaaaagatgaagatgccactatctgagaggtgggagaaacaaagggaatagtgtcaagcagcacaagggatgagaacattgtaggaaagagggaaaatttttagaaaatcttatcaccaaatgataatagtatgttggaaaagtgctccgagttacccatgagacaaccaccagcaatctctgggagagcagctttaatagagtggagaggataatttgcttcatgaaattagtaccagtaggcccctagccttttaaacttgtttccaactatttactcacgtgtctaagatttttttttattctcatgagtttcctacttacatggttaaacagggagaggaaatcaaccgacatctatgctctggcagggaaagaaggcaggtgttccagagttgttttcagtactgatataggaatctgtccttcacgaggctccaagcaaggcatggagtcgctgtcccgactggtagtggcggtgttctctggtaaaccagattccaagtcacctgctgaagctggtgagagcagtgaggaaggggatagtagagtatggaagtttgggaatagctgttaggggaaagagagtgacattattgcacaaaataggtgtcaattcatgcataaagaaggagtgagtgagcacaattacctgcagaaaatgaaattggacctgtggccatggatcattcctacatctgtgtttgccaccattgattttctgaaatttagggcattctagagacaggcattttaagatcaaacactgttcttagtgctccatctcattgagtttaatgagacatacttaaaaacaaatggaccgttttgcagagggctgagttcacacccagcttcacagagtagaaactaaaaatgttctaaattaactcaaatcaatttttaaaagattttctgagctgagagcacatttggccaagaccctgggtgccacgtgaaacatataaacgattgattgaatgaaaataggccatcctttctcttccttagacactaagcagccttttgtcctgctcttttttactttaattggaagcatttttaggttttagagccagttttgttctaaatatatgaatacttacttttcccctttctgaaaagtcagagattttctccctttcttttttttttttttaatttatttttttttattatactttaagttttagggtacatgtgcacattgtgcaggttagttacatatgtatacatgtgccatgctggtgcgctgcacccactaactcgtcatctagcattaggtatatctcccaatgctatccctcccccctccccccaccccaccacagtccccagagtgtgatattccccttcctgtgtccatgtgatctcattgttcagttcccacctacgagtgagaatatgcggtgtttggttttttgatcttgcgacagtttactgagaatgatgatttccaatttcatccatgtccctacaaaggacatgaactcatccttttttatggctgcgtagtattccatggtgtatatgtgccacattttcttaatccagtctatgattgttggacatttgggttggttccaagtctttgctattgtgaataatgccacaataaatatatgtgtgcatgtgtctttatagcagcatgatttatagtcatttgggtatatacccagtaatgggatggctgggtcaaatggtatttctagttctagatccctgaggaatcgccacactgacttccacaatggttgaactagtttacagtcccaccaacagtgtaaaagtgtttctatttctccacatcctctccagcacctgttgtttcctgactttttaatgattgccattctaactggtgtgagatggtatctcagagtggttttgatttgcatttctctgatggccagtgatgatgagcattttttcatgtgttttttggttgtataaatgtcttcttttgagaagtgtctgttcatgtccttcgcccactttttgatggggttgtttgtttttttcttgtaaatttgttggagttcattgtagattctggatattagccctttgtcagatgagtaggttgtgaaaattttctcccattttgtaggttgcctgttcactctgatggtagtttcttttgctgtgcagaagctctttagtttaattagatcccatttgtcaattttgtcttttgttgccattgcttttggtgttttggacatgaagtccttgcccatgcctatgtcctgaatggtaatgcctaggttttcttctagggtttttatggttttaggtctaacgtttaagtctttaatccatcttgaattgatttttgtataaggtgtaaggaagggatccagtttcagcttcctacatatggctagccagttttcccagcaccatttattaaatagggaatcctttccccattgcttgtttttctcagctttctcaaagatcagatagttgtaggtatgtggcattatttctgagggctctgttctgttccattgatctatatctctgttttggtaccagtaccatgctgttttggttactgtagccttgtagtatagtttgaagtcaggtagtgtgatgcctccagctttgttcttttggcttaggattgacttggcgatgcgggctcttttttggttccatatgaactttaaagtagttttttccaattctgtgaagaaagtcattggtagcttgatggggatggcattgaatctgtaaattaccttgggcagtatggccattttcacgatattgattcttcctacccatgagcatggaatgttcttccatttgtttgtatcctcttttatttccttgagcagtggtttgtagttctccttgaagaggtgcttcacatcccttgtaagttggattcctaggtattttattctctttgaagcaattgtgaatgggagttcactcatgatttggctctctgtttgtctgttgttggtgtataagaatgcttgtgatttttgtacattgattttgtatcctgagactttgctgaagttgcttatcagcttaaggagattttgggctgagacaatggggttttctagatatacaatcatatcgtctgcaaacagggacaatttgacttcctcttttcctaattgaataccctttatttccttctcctgcctaattgccctggccagaacttccaacactatgttgaataggagtggtgagagagggcatccctgtcttatgccgattttctccctttctgaaaagaaaggctagagattgaaaagttaaatatttcttctctgcagctagtaagaaaagaaccatttggttctaactgtacttgcctggactctaatttcctctatttgagtttctaatatatctgcattcagttcccccagcactcacatcccacagtagaggagcatcattggctattgtctaatttccccaagggaaaggtgtctacaattgagaaaaatagtctgaattccaggcacacttatttactacaaactctctaaatattgtaatgtccttttactatgaaattttgcaggctgtgatttcaaagagagctctttctttctctggcttttctgtgtgggcctcaacgaaactggcccttgctgctgttgttgctttctgaaagtgagttatcaaaattactaaccaattccattttgggtgttaatcaaatatttgtggctttcaccacgtggcaatttaaaaaccaggctcagcttaaaataccctttgacaattggttttgccttctttttatttcattctgaaaatgactaatatatttacgtcaattcatctaccccctaaaattattttccataaaccaagtacaaactagcatatgaacctacaagaatgccttgatttctagagctgttgtgcattggttaattcaataaatatatattggtgatccaccctgcagggggctgcatgctgttctacagatacagagttggtaagcatggccttatcccttgggtgctcagaatctattttgcttaccagtcagtaaagagcattgtatgttacaatgagggccatctccatcagctttactaaatgtggattagcctgaaatttaaactgtgtatcaataaggagaactccattttatttaattcattccgcaattccttttataaagcatagtccttatgtaaatatcttcatattcatttctcttataaatgtaaagtttcttaatgtagagcatacctataatttctgcccttgaaattagtatgtaagagtaaatgtttgtgagaagttgcagcattctaataggtttttacactgttaaggtttgtgtgaatttagggttagatcataggtatttctgtctttttctttcatgtacaatcttagaactgggtggattgttagacaatgtgtgctcttgagatagaaaactttgaagtctagaatttagaccttagtccaggtcacactgtggaaggggacaaataggcctaatatctgcttttcaccaaaatagaccaaaagaaaagattttagtctatgcttagagtattcttatgagcattgactttgtgccaatgtatttaaattctcagtttttatatttagaaaaccttaccgaaattcatcaggccacgttcaagaaaggcttaaagagcaaatcttgagtgaaaaatgtaatagccattcctagaagttgttcctttttaaaaatgccattgttaaagctgtcgttataatacatgctctctgtaaaaggtcaattagcagattccccaggatatttaaagttttgtgccaccttctaaatgtcaagttgaagttgggaatcttgtaatatttggaagaattttgccataaaatagtctatatgatgaaaaaacaattccaggtcaaggatgaaagagtggtaggaaatcttgtctttcctccagaagacagaggcagataagggcttagtccagattagcacaaatacagttcccacaccgagccccactccttggaatggaaaggaaattgaacactttttgatacttgacctcctttccctgaacgaaatggtatggaggggcagtatggagtagcagaaggaatagtttttcatgcttttttaataaaagaaaggctttacgcctgcacatacactatggagtatgttttgggagagatttgaaaggataaagggaagaaaataactagtgagacttggtgttggtcctggttatggccagagaaatgaaattaaaagtttggtccatgacttggaacacttgttttcagagcctggaggaaaagaggtgaggacagatatggatgtagaaatctttgtttctgagtttaaatgtgagaaaattcatgcctagtcccttcagttttttgctgagaagatgtaagggagaaaaaataatatctttttttgacctatctcaagagtcataatgggcattactgtaacaaaagagagattaacaagagaaaagcataacaaatgtatttaaccaaagttttatgtgacacagccttcaggcatgaagattgcacccagggaaaactatatatttttatgaacagttgttggaaataagagtggagaacaaaagggtacgatctaatagtaataacctgggaagaactcagtgaggcctgtttgttcagattcttcttggcctctggatatagagaaggaaccctatagactgagggtcttacgacctactttcggaggatgtaggtcagagattttttttttttttttttttttatgaccatgcttcagaggcaaaagtgtggaaaagattagggtgtgagctccaaggtgccatattatggagcagcatgttctgagccccaacaaagacaaggccatcttctaagaaatttgtggaggaataaggattgagatttgaagagaattgtgggtgtttgggaaatctatctattattggggacaggaaaagtttcctggcaacagtgagtatccagccaaggttgaaaactttgaatgtgtatttgtatcaatatgcctggttgtgttatttctctgccagtacagaatagtctagaggttgaaaagtgttcagaaagagccaaacatgaagttctgcagggtggctttaatagagaaacctaaatatgaagacattgaggatctggtgagagtggttagaaggattcacatgaaggttccatagagagggaagcagagccatggagtgagtgagagatcagtggggaatgaatgttgaaggtctctttgaggtagcagagcagttgttcttggagtaaggaagttagggaatttaaaaaaagggcgaaatatctccacaggggatctatataggtgttctagattagggatcagcaaactttaaaagggccagataggaaatattttcagctttgcaggccatatcatttttgttacaacttctcagctctgtccttaaagcatgaaggcagtcataaacaataagtaaagaaatggacatggctgtgtttctgtaaaccttttttacagagtaagtggtacgccagatttttctcaacagttgtagtttgctgatgccaggtcatagatgataataatttccaggatgtggataaatgtaagcagaagtaaagacttagaaatcagggggctaagaaactttaagatgtgtatattgactaaagccatctagatcaggatttttgagaatccgtttgaggctggtgatcatgaattatagaagagctactcatctgctctatagtgtgactccttcagctacatttggctgtgtggctgaagtcacagataaggcaaatgtttgcattcatatagggctaggatttttaccagatgggtataatggaatgatagaggagaagggaaattcaggatattgaaatgatgggaagtggtcagtaagctaaagaaaggagaaaactgataatagcaagtagaggggtcagttaactggtgatcatcaggaggtctaatacccaaatcagcttcacgagggcagtgactgttttattcactcacatgtcccagcacctagcatagtgtgtggcacatagtaggtcacaggaagatcatttaataagcaagcaggaaaagtgggaagttggggtcacgcttggatgagtggtggaggaagttatttgttatggatgacatctcatatgcctgaaatgcacacacaataagttctcagtaattattagcctttatcattatgctttttgaacttttctagggactacatattttcggagaaataaaattgagaataatttctctgcaaatgagtgagttgacctttcccaaatgagtatcatttaaggccattggaacaattagtattgttaaatttaacttcatatgggcagaatacaaaacaaaatactagtagaaattatctcctttccaaattagcctagtctggttctcaaagccagacactcagtgtacttacttctaaagccttcagttgtctagtttagtgtgcttatcaccagtgtggaaaattttatatttacattgctgaatcacctctcagtacatttgaatggcctctcttttgctttttgtctagggctgaagtgtcattcaaaaataggggtgactcaggaagagtttacaggagggagaaggctgaaatgataacaaatctaatttttaaaccatgccagttgtgttagtctgtttttgttgttataaaggaatacctgagactgggcaatttataaagaaaagaggattaattggctcatcgttctccaggctgcacaggaagcatggtgctgacatctgcttctggtgagggcatcaggaagcttatggtagaaggctaagggggaacagccacctcacatagtgaaagtgggagcaagagagagaagagggaggttccaggctctttttaacaaccagatctcatgtgaactgagtgagaattcactcatcaccaaggggatggcactaaaccattcatgagggatctttcccccatgattcaatacctcccaccaggccctacctccaactttggggattacaattcaagatgagatttggaaaggaccaacataaaaaccctatcaccagtgctttcatatttagttacatgaatcaaaaaagtgttttgattttgaacattaagaaatattctttcatatccttttcagacaacttgtatgtcttttggatgtctttttcagatgacctatttctcctttcacaacccatagtatcacgacttgtacacagtaaatatttaataagtctgtgctgactgatctttaatgacaacataagcagttctctgaaatgccctttgctctacctcttggcctggtaaatttattttatgattcggtttcaatgtcacatttaaaacggttcccagctctcatcgttaaaatgaatgggcccctgttccaggtagctcatacccagtttccattacattgtcgttgttcatctgtttctcattcttgccttttatctaccaaggagcagggagatttgggcttattcatctttagtatctctgataccttgcatgtgcttgccatctgtaaagtgctccagaattttctggcaaatgattgtgtgacagggagaaaactcattctataagcatgatgtaggctttagttggcaaaccctgccctctaaaggtttttgcttctttaaattttttctgcagttagaatactgctgtcaaatgagcaatgagtaactgattatgactttgtgatccaattagcagatgtgattaggggatggttagcctttgtttctatacctacttcttttaaattcagaataatccataattgatactcagtatatctttgctgaaagcacagatttcaccaagatgttaacaatggccatatttgagtagtagtatttttatttaactgttttctttagacataatgtttttcgttgtttgaattttctttttcaggatatgtattagaaaaaaaaactattttcattttttaaaatagatggtgtatgaggtagacaattgagagaaatgaatgctttgatgcaacttggaaccagtcagggctggatcacaatgaggcagtctacagtttggtaacaaatctcagtggtttaggaaagcaaaagtttatttgctccagattgatggggactcttctacattcagtctctcagatccaagcctccttcagctcaaagtgacttccaaagttgctgtggccaaaagagggagaaatcgaagagaccagccagctctcacctggctcagcgcatgtcactttccttggccaaaacaagtcccaaggccccaagcttactgcacaagagagtggaaaatgcagagaagcacatggaatccagtatatggtgagcaccagttgtctctgccaacatgacggtaactcttttcatttttcagttactgtaatgaatgtatgttggatccagactgcggtttctgctacaagatgaacaaatcaactgtcattgactcctcctgtgttccagttaataaagcatctacaaatgaggcagcctggggcaggtatatcactcattttaccatacgaatatataataatatttcaaaacgaggcttatgtttaagttttcagagtgcttgcacttatagcagttcttttaaactggccttcataactacattactttgcagcatatactggtgatagtggatgcaaagcattgcaattgtgtgtttcacacagagtagaaagcactcaggcctagacttttggagacccagatttctctaataaggtataggagtttggatctttagttttaggcagctattcacaaatactgccaaggcaatttctcccactgcatattgtttaattgcactgtatttccaaactcccaagcttttaaatgaaagaaaactgtaaagtcaaaatgaattactatcacgttaggttgggcacagtgcatcacgactgtaatcccagcactttgggaggctgaggcaggcagatcacttgaggtcaggagttcgagaccaccctggccaacatggtgaaaccccacctctacaaaaatacaaaaattagctgagagtggtggcacatgcctgtaatcccagctgctcaggaggctgaggcaggagaaaggagaatcacttgaacctgggagatagagattgcagtgagctgagatcaaaccactgcactccagcctagacaacagagcaagactctgcctcaaaaaaaagaaaaaaaaaaaaaaaaaaaaaaagaattactatcacattacattcttttatggaactttttttttttattcttagaggccttttccagggttcagtgaaattaagcaaaataaggataaaatttggtagtcattggcatgtagctggcttgggaggctagaaaccttaatgtttttggtttgtagtacatgcataaatgaaatattagtataaaataaatattctccagatttatgaactaacatttatatccagacatataaaatgtgtaaatgttatctgatatggctttaatctattttgtgttttaaattcctataaaagaatattctcttatcttgtctactcatagtactgataaaggcaatgaaatctgtaataaagtattgtgtctcataggagctataaagtataatgcaataattgtttcattagagaactgctccaaagaagtaaattatatgttagttgagtaaaaatccagaccacattttaaatatactaattacaaagaaatatgtaaaagaaatacaattagtgttttaaatgaacactcaaaagagtttcttttaaaaatactcagtttatagttcttatcagccaaattttgttagtgagttaattgattaaatatttctagatgtacttgttcacagctttaaacctttagagttttgtttttgccaataggaaaaaaaaaaaactaagttactactagtctagaattataaacatgttatgaaatctgttaaaaaaagaaatgtacatagtttcctgtattttacataattaatttataaacttattagaactctactaagtagtaaagagacactaaaattagatgtttctcttaccttcagtagaagagttagaggtcagaggcctcaaagcaggagttttggcttttttgcaaataacaaatcatacaactttttagtagaaatgtttattcctttatttcagaaaaattaattcaacaactcactcttacattttatttgtatttttataccatcatcctgtaactgcacataaattagagaaaagtaaggcacagataactaagtagcaaaaataaaaataactaaaaaaaaaatgatgttcacagcatatccttacaatagtctcaaactctttacaaaaaaagaaagaaaaaaatgttttcttactcctccctgtgctgagcaacggtgctccttctaggtggaccactgctattggttacctccttagtcttggctagaaaagagcaaaaaggcaggatgtgttcaccatgaaaaattcttcagatagattttccacatgtaggtaaaataatattcagtatatataatagtatttttgttggttgattggtggtttggttgatagattttatacaattacctggaatggaactctaagggcaaagtcaaccatgaccttggattcccatctagagatatactatctctagatatttcaaggtcgagtgttgaggcaatccatagccatatatcctgatctctaactgtagctgtttcctgaaaagacaccaggtggaatggcaacaccattaatgatggaaatagtataataatgttgatgaactctgaattgtcaatataatgaaaatcatttgtacatataatcaactatgagattagttggaaacaaaacttcaaaggtccatcagtatggttttctatatctatgttgttaaatttcaatgaaaacttaaaaaaattatttagcagacttctagaaaatgtagtagactgagctgctgcaggaaaatctcctcctgcccataacctccccctacacctccaacatgcatcccacacacatacaagtttaatgcacagcagaacttgaaagaaatccccaagcgtcacaaaagagtgtaagtggtgagcccacatgggaatattagaagcgaatataagccttacaggtgagaggttagagtttttaatgctgagtgagataagctccaggccttgcctctgtagttacaaagcactatccaggttctgaaatagggacaagaaaaaatctggctagactgggcttggaaagctacctacttctctgctgctcatttgggactacaaatggaaataatggtacacatgaaaaagcaaaaccaagagcctttgctatgagggagtgtgtgttctcatttcacactgcctttgtgaagtgggaaccatgagttgagaaacgtaaacaaataaataaattgaatgaaaagtaggtcctaaactggagacatccatagaggcatgttaggaatccacatggaattatcagaacccagtgtacatgagatgtccatgggaagcaactgttggtaaatacaggaggacagtcagagagtatcaggctggtgcaaaagttaactgcggttttaccattactttttgccattaaaagtaatggtaaaaccacagttaacttttgcaccaacctaatagaaacgacaccaattattggaggcaaggaagccaccaggtgtgacagatggacaaatgaatacataaagaaccttgcattgcaaaaaaaaaaaaaaaaaattgaaagagactttaaaagaaataaaggaaatagtgtatttttcaattatactgaaagttatatacttatgattggtgcagtatatatgtgtattttatatgacatatatatgtgttataattcagcaattttgcaaaaaaaaaacttgggaagctgaaattttagagaaatgacataggatgtggtatgagaacttttagaaaaaagccttctaatgagtttttaaaatttttctgctttttattttttttcagaaagaaattgagattacaattagtttttcaatttgttaaatatagatgttacaagtataagagtaaactcttaaaatatgaactgttagagggagaaataagagactcaaagtatagtaagagaagaaggggcaaaaaaaaaaacccagaaaaattacatctaaatataactgtttttacaataaaaaataaaccaattaaacacagttgtaaaagacaaagatcttcatattgaattttttaatacagttgtatgctgttcacaggagacagtcacagaaaggttagaaatacagaaataagaggaaagaaaaaattagataagtactaagtcaaaaaaacaaaaacaagcagagactatttagaaaatttacaagcttgataggagagtcaaacagaacctaaagtagagaatgtcattctttttaagaaaacatggaacacttctgaaaatttaccatgttcaagcacaaacagtaaattcagtaagcttatataaatgtatagatatttcagtaaattataagtaaatccaaataatcagtatcatccagaacatgttttctaataaaaatgcaataaaactacaaaacaacagaaagatatttatcaccccttctagtttagctgggaaactaaaataaacaaaacacccaaaaagcaacttcaaattaattaataggtttagaagaaatcacaatgcaaaacaagatgttaaaattaataactaaacagatccacaagaggttagaagtagaacatagagtaagcctgtagagttagcagaggatgggaagtgcaaagcaaagaaatactcggaaggatcaaaaaataaaagttcttaaagaagactaataaaatgtggaaacctcttgcaatactaatcaagaagagagagaaggcacaaacaatatttagaataaaaaagatgtataataatggatagtaaagatttttaaattcataagagaatactatgaaccgtgttctccagtgcatttgaaaacagataaatggacagttttcaagaaaaaatgtaactttccagaaccaattccgaacctctgtgaagtaagtgatttctataccctacttacagatgagaatagtgtcgcttagaaggtatgaatgactttctcaaagtcaaaaggccagtaagtccacttcttataggggagcagcaactgagtagtggaaagacacacattttagattcagatagtttccaatttctaagttaaagaaagtatgttattgacaaatcaggcattagaattttttttctgtatttatctgtgtctatttatccgcctccctacctcctgactctccatatatacaaaaccttaaataatctattctgaaacttcaaacctcctgactatttaaaatagtattgctaatgagggacactttcttaatgcgctgattcagtatttgtttcctataatacagcactttagctctgtaattagaaacactaaaatagctagatagattccctatttggcaattcattgtttaccgtattcattcagcagagatatttttctcaaagctgcactctgatgtaacacccagcctgttttcccagcatttcaccactctcccacacagattctagtcagtttaaatcccttgtcattaccctaatatctattataatttcctgtctctatgtcttttctcacactgtgccttctgtctagaatttaccctccttgatctctgcctgaagtctattttattttttttgctcagattagatgtccctttttccttgcagtttctgtgataagccccagaaaacaatgcttattctatctcctgctgccctctagcactcccctggatgtagcatactatgagagacatttcctggctataagatgaatgatagctgtaagtcctactggaacacctcacagggctgacactatgtgccacttagcagtagcagtgtgaggcaacctggcctggagatttccaggagacacgtccacctcagtacagatgcaactcttacaaacctttaaacaaagttacccttacaagactagcttaacctccttttatgaatgaaagacctggtaactgactccgattgaacacaggtataagaaaggggaagaatcccccaagctctgagaatagtctccagatggagaccctcttggatgggtggtcatctgacccctgattgaatctggctcatgccacccacctgctcccattatccaacttgtaagagcgctgctagaataaactgctgatgttcaatatcagtcggtatctaagtctcatctttgatgtgaatcagaccacattggaagaaaaattgccactggggaagccagttaactaggaccattcaaaacccctgaataatgaatgatacctgtatagtttatatgataattatattttttatatgatagccatctgtgtttgaatgtatatttgcttctagattataaattctaatttctatattctgcattgtttttaaacctttggtgttttatatacatcaagtattcaatccatacttataaaaatatataagggtttaaaattatcacagttataaatgagaggatatgatgttccagtcacttcattttagttacatcttttgcatccatacttatttccaggaaaggaaacttaggaaaaaattgaagtaatgcaatttacattaacacaaagattttaatgtttacctgtagtaataaaaacactaaaaaacaatttaaaaataatacttaaccatgtgcttcagtatatcactgcaaaaatattgcttggagccatactttgtgaaaaacacttcttaaaaattattggaagaagccaggtgaggtggcacattcctgtagtcccagctactcgagaggtgaaagcaggaggatcacttgagcccaggagtttaaagccagcctgggcaacatagcagaactccgtctataataataataatatcatcatcatcctggctaaagattattagaagaaatattcagcatatttcctgaaaatattcactgatatgccagggaagcagttcatctatggtgatagcataagaccaaatgtattacaaaactatatcaaatagcaaaaacagagggagttttcctttgtaacctctttaaaatttttgaaaagagatatcacttttgtatttagaaaatgaaatttattttatcattgacaaaccacatcagtatcttaaggtactcatgtacaggattgatgtatttttatcagttagtcacataagggatagaaaaacctccagctgtgttcctaaattaataacaatgtagctcaaagttaatttttaccaacataaattttatagagagaagtatagtgtctgatatagaatattttaatccatttgacttttaaaattatacttttttatgttactgcttaaatagaagtcattatggtagattattctctttagtatctgtagctgcatgttatgtgtttggaagtttcatctacccataaataatttcagagatcacatgcctctaggctgttactttttcaggttcagaaatttagactcccttggatttagtgactatattgcagactcggatactatttatgttgcaaagtctacaaatcaaaagaccaaaacacttctgagtaatttatctccctcgtccatattaatttatcgaatttcttacttgacatttaattgtaataataaataaacacttgttaacagttttatccaagtagcgatattcataatatatttaactacctttcattttcagtcaaacttaatatttctagtcaacccatgttccttttacatttttaacatttttcttcatatttcctttgaaaagtagactgtgagttatttctcactaaagaagattaaagaagactaagatttttattataaggataaaagccaaagcttgaattccatgtgcatggtgagtgtaagataatggtggtgaaccttggttcatcaaacattggggcaagtaagcatcagaaggtgtacagcagagatgaagtctggggagcttggaatttattaaaaagggggctgagaaagtaatgagaacaagagaaaggaaaatgcgtggctggtgccaatacagtaaatatgagtttagatcagatggttaaagagccttatttagatattttaatttgttttttatagatacattttcataggcgtgggaatcatattgccagtgattttaggtgaatggctttatgtgatacctggacatggataggatattgtgtcacatagtgagttaaatattttcaatctgtgaagaagaaaatcagttggctagcatgattttaacacttgggcaggaaacgttatcttggaaatcatcattctcagtaaactatcgcaagaagaaaaaaccaaacaccgcatattctcactcataggtgggaattgaacaatgagaacacatggacataggaaggggaacatcacactctggggactgttgtggggtggggggaggggggagggatagcattgggagatatacctaatgctagatgacgagttagtgtgtgcagcgcaccagcatgtcacatgtatacatatgtaactaacctgcacattgtgcacatgtaccctaaaacttaaagtataataataaaaaaattaataatattcttttcattccatttttattcaactatcttctattcttggcacgtgtgatcgattgtattattgttcaaagtatctgctaccactcccaagggaaggattgtatttccctggcccattcagtcttatccacatgagctgttctggccaaggaaattagagtggaaccaatccctgtcatttctgagccaaagctttaaggcatggagttttaaacaaggatttgccacgtcctcttttccctcttcggtatagttcaccatgtcctaaaatagaaggtgttccattagatttggtcacagggtgaagaaaatgtggaacagaagcataactgacctgaggtagacctgtggtgtgagcaacgcattaagcttgggttttgtaaatcccactgcaattcgctctcttttgttactctgacataatctattctcttctgactgatatagcaagataccctggattctcctgtggaagggcacaaaaaaaaattttttttttttgagacggagtcttgctctgttacccaggctggagtgtagtggcacaatctcggctcactgcaagctccgcctcccgggttcacgccattctcctgcctcagcctcccgagtagctgggactacaggcgcccgccaacacgcccggctaatttttgtatttagtagagatggggtttcaccgtgttagccaggatggtctcgatctcctgacctcatgatccgcccgccttggtctccgaaagtgctgggattacaggcgtgagccactgcgaaaaattttttttgagttataaaaggaactctaaagaaaaccattgaacaaataatagtacagggcagtgaaagaaagggtaaaaaattatgaaaggaattgccaaatgtcatgagtttggggagcagtgcagtaggaagtagaagtttggggaacactgcagtaggaagtagagagctgttaaggtttttaagtaggggctaatgtgagtggctttaggttcaggagataaaattctgatataagaaggaagaaggaattgtaaagaattttatgaagaacaaacaaagggcaaggcatttggaaatatggtaatataagggatatagaagaatggtgcttgcatttttacatgttgctttatatatatatatatatatatatatatatatatatatatatatatatatatatatatataaatttaaaaatttaagccgaagattatacatgctgctaggtcacagaaagaagagcagcattagatatccaaataatctcaggaggttttttgctggacagcataaatgaaataaaatttgaccattcaaatcaaagaaccgctgcctctgtacacatcatttggtatccaggtccttcctactctcttggtttcagtgctagttttataacataaacaaaatagttttccactacatgcgatctgggtttacaacttgtgtagtttgtacaatagcaatccatgttttagcattggaatatgcatagacattcatgaaccaatgccaatcacaattcctacagtttgaaaacagtgccaaaatggcaacctgaaaactgtgataacacaaaactctgtgctcataatttctaagaaaaattcattatagtgcccttcactctgtcttcacttgccctctgttaggatgaatgctgtcttattttatctaggaagtttattcttaaatagttccaaggattaaccaactttattttcatttcagaggcacatgtttcctggaaccctccaaaaattacattttttttctttttgttgtcatttatttggtaaatgagttataggggaaagattggatttagagctgttctgcatggacaaacccataaatattaatattatatttaattattggtaggttggattatataacagaatttaaactctgttcacattggtatggcatttatacctgcaaagataaagagttttttctgtggtcattttataggattgaaatttgacattgtgctacatgctattaaaaatgtattattgggcagtgaacacccaagtgtgctttatagttcctttggctttgactttgtgctagagcaatgtctgttatttttctctgcattgaaaggagcatttatccttttaaatgtattcagaaagccagtacatttaattgaaagcatattaaaaagactcagacattactccctaagatttataatctaagaggtagattgtaacatttacacacgcatacttcaaaattattttaaagaaatgaatgttccttttacaaatagagaaaaaaaagtatttgcagtgtatactgcttagtgtcaaggacatttgagagaaaaggtaaatgaaaaatttattgtagaatgtgtaaatttggagtgagttttagaaatcagcccgggcttttaggaacatcaaataatggaaggcttgataaataaaagtttgtagtaaactatgggacagagcacttcagatacaagatatggactgtaaatctgtaaatatttaaagattatgtattgccaccttaatatattttaaaataatgtcaaaggtcctataactgtgacttagtttaactttctatgacataaatgagaaaaaaaattctccaaacgataaaaatatttgtaaaccatgaatttattttgtgacatttttaggctcataaacatatgtcatatattccttattgttcttgatgaaaatttcatttaaggcttaaaaatgagactgcaagtgtgatacatggatatccatttactaaacaatttcaaccatcataacttctgaagcctcagagataggaacctgtttgcttatataactatactgttttcccttctgtggggtgcaagcggttgtctgaaaactatgattgacagtggaaaaacatcttcgttcgtttaacattgagtttttgggaaatacttgattatgcagacctatgttgttttttaattaattggcttaggaaacaggcaatcggaattctgcttgggacaatcagggaaggaaagggccagatcagagttaagtcaatattttatatttcaatttttatacttataacaatattttatatgtagaaacttttctacatctgtgccttcaaactgtagttgttattggtatatgaaacatctacatttattctgcctacttaattgttcaacaaactttaagaactttctgtataacctaagatagtataccaaaccttggtatttataaaaacttgggggacatcagctaggacagttagacacacttgaaacagaatttcaaaggtgattacaaagcagagatacatgctgaccttgggctatgtcacataagctacttatgtaattagaacttataaacttacgtaattagctacttataaagttagagttaaacaaagaaggtaattactcagagcatcatcttccctgctagctcagatactattgtaagctcttcactgattgataagagatcctatctgatatcttggtagcagtggacatttttgcaagtaattctcaattattattactttgcttctttaaatagaaattaagaaggtaccgatcagtatttaatgtcttctccccctccccccaactcattttttttttcctgtgacttcacagaaaagtttcaaaaatcaactcctcagttttagatgtacatgactgggggaatcagatgattttaggaactctgtgggtatttaatagctttttcagttaggcttaactgtgagaagggatcacacacctggggatgtcacttgagtcagaggagtggcccaagggggctctctggcagtgtaagaatgcaggaggtaaattaggaaacatctgtagaagttaaagagctggaaagtgttaccataaagagatactacttgaaaggacaaagcagaggagaaactgacaaaatagaatgaagaaaaacagggcagacctagacaagttcaaggaatgtgtatcctggaagctagttcaggaaacaagaacacatagcctcctctgtagtgagtattctcatttgtggatctctctttgctggtcaaggaaccgtctttgaagtaagcagaattgccccgggtatactgacaaagtcctgataaggtttatagctttgagtttttctcatagatttagtgtttggcatctgcatacgttggctatagatattttaaaatatatataaagtatgtaaaaactaagatgactactaactgaaatagtagttacattttatgatctactgtgtacagctaactttttcgtgaatatagatgaagcattctgtatctttgtttcactaacccccttagctgccatcagttgcctttctcagctggcctctataaaagtttggtgttttatgatgcaaaagtttcatttcaggcaagaaaatctctctgcactaaataaggagttgatacaatgtaagttactaagagcctaaatctgtggagcagatgacccacaactagaagccagcacaccccatcctaaatggaaacagtaatggaactgatcattctgtggatttgcctgtgacttgtaacagcagtgtaaccttgtctaatgacctcctgcatcccaccctagcacaccacatggaccaccctaaaatgagcaacccggaattggttatgagctactttgagtctttcaaaagagactttctaatgaatttgttgagtactcctgtgagagatgttcaaagaaattagtacactttttcccaatactattcactcttatcttccaacttaaaaagttgaatgagatgttctctgtgtttttgctgttatgaaaagagaaggatacagtcactcaccacctacctattttttttttccctcaaggcatttgtggttcttggtatcctgaaagtgggaatgacccaacccacaatgggataacacatttgcccaagataaaaggaaatgataaagcatacccagtgtataggatgtaaaaaagctaaaaatatctgcttttctaggcatttttattagtctttcaaattcttaaaatctttcaaatgtttagaattcttctgaattcagtaaagcattgcttttcaccagcttatcaccaagaactaaggatgaaggcaaatggtgagaggttcttgcagcataaccaaaggagacccatgaaaggacaggcttatttgtttgtttttcatcctagtgttttatttttaaaaattaagtgaattttcctttataccctaaaatacagccatgtccagcttactaatataattcttgtattacttacccttgatttttctttctttttttttattatactttaagtaagttctagggtacatgtgcacaacgtgcaggtttgttacatatgtatacatgtgccatgttggtgtgctgcacccattaactcgtcatttacattaggtatatctcctaatgctatccctcccccctccccccaccccacaacaggccccggggtgtgatgttccccttcctgtgtccaagtgttctcattgttcaattcccacctatgagtgagaacaggctacttatccttgatttttctaggcaacccaacctacggcctttcatctcatctcatccttcaccccatcagtgagaaaaggaaatttttgtttgtagaagaaatgtgctgttttattctgtagcacatcagtacctgtgctaatttgagaatcataactagcgtagatccaacccagaaacaaaccccaagttcacaaaacttaaaaaggaataggcaaattctagttgaaactgtttcagacctcagctcactatcagcccagaacatattatgtgcctcatcgatttaaatgttaccgttaggatttggtggacactgtaagtctagagaatagctaattgaataagacttgaacatctaattgaatttcttgaacaaaatgtatactcagaacagaaaatatttcagaaatctatgacttcataatgtcactggctctgaaacattaacacactacttttccagttttatttggctatatttatttgacaattggatctcttttatagaatgttgtactgtgctataacttaacaactaaaacaacatttatttgttttttccagactgggaatgtcagaattgtgtcattgtagctagcatatatcaagatacttttcagctattgcttcaaatgctctatttttccctacatgccctttagtagaactgctttccagtgctttttctataaccaataattattgcattatggttatttttatccccgttcgcctcttaccgtcccccaaactagaaacttctcaagggcaaagttgggataatgttgttctctctgccagacgttatgcctggacacatagaaatctctcagtgcatgtgaatgttagtgaaaggatagtaataggtgaaaagaaagaatgctccagcctacgagtcctatagctgttttgacaaagaacctgttcgatttattcttccaaatgattttatatcatgtggagaaggccagtctgtttgaaaaacttgtagtagaaatgacaatagttaacaataaaggccagaccatcaccatatccagtacagctcacagtattctctgctttattctgttttctctttttctatttttgattcatatttgggcatatgggattcaggaagtttctttcagaaagtctaaaatcaatgggaagcttagctctggtataatgtagagaatacttgctggaatccaacgactttgatttgtgtctggactcagtaactgaccagaagatggccttgggtcatttattttacttctctaatccttagtttgctgatctttaaaacagaagaaagtaataacactagatcttgcttaccatctaagatcactgagaaagtcaaatgaaaaaaaaaaagtgtaagaagaattcataaacttgatttaattttttaaagaccaacttaaaaatctcagctccacaatctatcatatctttctgccttatctaagaggataaagcgattgataatgcatattgtgaaatatgcataattgtgataatgcatattgtgacatatgcataattgtgataatgcatattgtgacatatgcataattggcaaatgtgaaatttaaaatttctttcttactagtgttgagctaggccttgaaggataggcagggtttgtatatgcagggatagcagacgtaattgtatgagataaccaaatttagtaactgacagcaatttatgtttttcctctctttaaaatgtgcttttccattcttaagtatgtattttaccataaaagaggagttcctttttttctaccaaagcattcttcagtttgtaagaacttttatctattaatttttgttaaattgtatacaattataacagtgtttagcattatcagaattttgattttagtgagccagtgtgttacttgatacaataaagatcagctaaagccttcttgtgttgttcttaaaggaatagatgttttctctttactctctatttggaaaaagtttaggctagtttttaaaaacagtacaaagaggaaattataagtacataattcattaagtgtctttcataagcttattcctcctaagctattacacttgctgtctacatctgtagctcatttcctggggaggtaaagcaatgacattaaaactccagcagtacaatctacatcagaatggttgattaacgttttgaagtattatccccagacctcacattttaaattaatttaattcttaattatcacaaagaaagaaaagagtatgggcaaaagtgaagagaatattcagagcagttttcctcgtcttgaaagatatgattatagttttacagaatttggcaatacaatatagatgaagtaatatacgaaatcactcatactggaaattgtccaagattgaaactttcgaaatgtggagttatccaagatgtgactgtgtaggcttcagacagtttccaggaatgacattcttcagcgtaaaatggaaactccaattttaaaatgcctgtgtaggggttctgttcagttaatattcccaattacatctttttaattgctattttaaattttaaatcaaatggaactcacattgagattgtagatggtagtggctgcagccgtgtttcaagtctccctgaagcttcttcatcccccactactccaataaaaacagacagttggcaaggaatgggccttatttgaatcttgattcaaatgaactgaaaaaagtcacttaaagacaaccaggaaagtgtgaacagtgattggctgtttgatgttcttaagaaattattgttaatttttcaggtgcagtaatcatattgttatatattttttaagtccttgcagagatacatactgaaatagtaacagatgaaatatggtatctgaaatttgcttcagagtaacccaggagaggtggattaagtgacaatttagatgaaatgtcattggccatgtgtttacagttgttgaaagtttgttatgggtacatccggttaattatactatactctctacttttgaatatatttgaaaatatttgtaataaaataaaattttgatgtatgtcaaaataaatgctgacctagatcaaagacaaaagtatttttaagatagctaagaaacaaacagaatagataaaatggaatgcaaaaaatatctaattaatccaataaaagaagttttaaagggagggcaaaagtaatactataggctgggcacagtgggtcacgcctgtaatcccagcacattgggaggccgaggtaggtggatcacttgaggccaggagtttgagaccagcgtggccaacatggtgaaaccccatctctactaaaaaaaaaaaaaaaaaaaaaaaaaaaattagctgggcatgatgtcaggcgcctgtaatccctgctacttgggaggctgaggcaggagaatcacttgaacccaggaggcagaggttgcagggagatcacaccattacactccagcctgggtgacagagtgagactctatctcaaaaaaaaaaaaaaaaaggtaatactacaaactaaatgtttgtccccccaccccctaaagtcatatgttgaaattagaaaccgccaggtgcaatgactcacgcccgtaatcccagcagtttgggaggctgaggcaggtggatcacttgaggccaggattcgagaccagcatggccaacatggtgaaacctcatctctactaaaaatatacaaatcagccgggcgtagccgtgggcgcctgtagtcctagctactcaggaggctgaggcaggagaatcgcttgaatctcagaggcggaggttgcagtgagctgagattgcaccactgcactccagcctgagcaacagagcaagcatctatctcacaaaaagagagaaggggagaaagaaaggagaaagaaagaaagagaagaaagaaaaggaaggaaggcaggaaggaaggaaggaaggaagaaagagagagagaaagaaagaaaagaaaagaaaagaaaagaaaagaaaagaaaagaaaagaaaaaagaaattagtcccaatgtgaggatatttagaggtggggcctttgggaggtgattaggtcatgagggtggagtcatcataaatgggataagtgcctttataaaggggccccagatagattccctcttccattctaccatgtgagggcacagatgaaagatggctatgaaccagggagcagaccctcaccagacaccaaatcttcttgtgcctagatcttggacttcccagcctccaaaaccctgagaaataaatttctttgtgtaagagccatccagtctgtggtattctgttatagcagcttaaacagactaagacaagtaacaaagttgtttcttttatgagataaccataaaagaaacaaattagagatttaaaccaactctattggtaaactatgttaaaataaattgtttagaaactccaataaaagacagaaactccagtaaaagacagagttgtccaattagacatgaaaacaaatgcaactgtctgctgtctagaaaaatggggatggaaacagacatactgtactaacactaatcatataaagctagagtgcttttgttaatatttgacaaagactccagattaaggaatattatcagagattaagaaggatggcttataataaagtggccaattcatcaagacatacaattcttaaatgtatattcctctaataatagagcttcttagaaatcagtaaaaaaaattttcacaaaaattactaaatatttgaatattaaacaatacatttctaaataacccatgctgtaaaaaaggacatcacaaggtaattagaaaatgttttgaagtcaatgaaaatgaaattataacatatcaagaacgtcaggggacagctaaagcaatacttaacagcaaacttatactttaaaataagtatattagaaaattttgaaaggtttaaaatcaattacctaagcttacaattatgaagctaaaaaatgaagagcaagtaaaacccaaagtaattagaaggaaagatataatggtagtaggaaacaataaaatagaaaatgtaaaagcaatagatgaagtaaatgaaatcaaaaggtaatttcttgaagagatcaataaaaagcagattaagtcatagctggactcgtttagggagaaaaggagacccaactttctattattataattaaaagagagcacttctaataaatggagaaaattcctggtgacacatatttccaaaagaaataggaaaactaaatcatctatttaaaaaatcaaatttgtattaaaaatctccccacaaagaaaactgcattggtgaattaaaccagatatttaaagaagaaataatgccaatcctatataaactctttcagaaaagggcagagtgggggaaatttcccaactcattttataaggttggttttatcttcattaccaaatctatccagaaactgcaagaaagaaaaactatagatgaacatcgcagtatctcccttgtatacagacagaaaaattctcaaattgaatccagcaatataaaggaattcatggttgatttaacatctgtattcaatggatgtaattcattatattaagagaagaaaagagaaaaatcatatgatcatcttaatacatacagaaaataaattgattaaattcctaatccattcatgataaaaactctcagaaggctggtaatggaaggaaacttcctcgacctgatacataacatctcttaaaaacctacagcttacattatacttaatagcaaaatattattttccctctaaaattgaaaactaggtgagaatgtctactcttaacactactacatgacattttcctggagatcctagccagtgtaataaggcaagaaaaggcatacagtttggaaaggaatatatactctattttcagatggcattatttttataaaatgctatgagaataaataaatgaatgtaacaaagtctcaaaaaaggtcattgtagaaaaatatattttatttctattactaacaattggcaaatgaaatattttaaaggctaattatatcatcaaaagatgaaattcttaaagataaatttagcaagaaataacaggatcactacactgaacactataaaatattaccgagtgaaattaaagaagatctaactaagtagatcacactcgtggataagaagacttaatatggttaagatgtcggttcttcacttttacattgttggtgggactgtaaactagtccaaccattgtggaagtcagtgtggcgattcctcagggatctagaactagaaataccatttgccccagccatcccattactgggtatatacccaaaggattataaatcatgctgctataagacacattcacacatatgtttattgcggcactattcacaatagcaaagacttgaaaccaacccaaatgtccaacaataatagactggattaagaaaatgtggcatatatacaccatggaatactatgcagccataaaaaaggatgagttcatgtcctttgtagggacatggatgaagctggaaaccatcattctcagcaaactatcgcaaggacaaaaaaaccaaacaccgcatgttctcactcataggtgggaactgaacaatgagaacacatggacacaggaaggggaacatcacacaccagagactgttgtggggtggggggatggggaaaggatagcattaggagatatacctgatgctaaatgacgagttaatgggtgcagcacaccaacagggcacatgtgtacatatgtaacaaacctgcacgttgtgcacatgtaccctaaaacttaaagtataataataatttttaaaaaagatgtcagttccttttaagttgatctctagatcaactcaagtaattctaatcataatccctataaacagttctataaaaaatgacaagctcgttctgaaatttatatagaaatgcaaaagaactggaatggccaaaacattcctgaaaaagaaagacatgccctatctgatttcaagacttactataaagttacagtaatccagacaatgtgatgttggtaaaatagacataaacatcaagggaacagaataaagtccagaaatagatccatatatgcatggccaattgattttcaataaaaaaaccaaattaatccaatggggaaagaatagtcttttcaacaaatggtcctaatacagttggctatctacattgcgggtgaaggtggagggaatggacctcaactcttacaccctaaacacaaaaaagctcaatatacatcatagacctaatagtaaaagctaaaatcataaaacatttataaggaaacataggaggaaatctttgcgacatcagggtaagcaagtagataggacacaaaaagcacacacaacaaaagaaaaaattgatatattggagttcattaaaattaaaattgtctactctttgaaagacattgttaagagaatacaaagcccaagccacagaccggaagtattatttacaataagtatatctaacaaaggaattatgaataaagaattcttacaacttaaaataaataaagcaacctttcaaaagacgccaaaagatttgaacagacaagtcacaaaagactataaaaagatggcaaataagcacatagatataatgttcaacattattaatcattaaagaaatgcaaaaaaattatagtgacatgctacagcacaccaactagaatagctaaaatgaaaaagtcaaaatatcaagtgttggtgaggttgtgaagcatcatgttaatgggaatgtaaattggtacaaacacttcagaaatcagtttggaggtttcttctgaagttaatcacatcttttccatacaacccagtaattcaattatgacacatttagtcaaatgaaataaaatgtgtccaacaaatgtttctacacagtcgtttatagcagccttattcataatggacaaaattggaaattacgtagatgttacttcaacaggtgagtggataaacaaattatgatacacccatataattaaatactacccagatagatggaaggaattactgatatgtccagtaacctggtacaatttcagaaacattgtgttgggcaaaaaagccagatacaaaacaatatatactgtacaagtatttatataaaattctagaagagcaaacccaatctctattgaccagaaatagctcagttattgactggagttgggcatgaaggaaatttttggtgttatggaaatgtttactctcttgtctgtggtagtggttacatggatttatacattgtcaaaactcattgacttacacgtaaaattggtacactttatattttgtatattatacatgaatagatgattaaagtactggatttcttgacttccaagaattatagcatacaaaattatatcttcctagctattttcaaagggcagactaattctactttaagcaaacagcatttgatgacacttttcatcacagacaagattctcctggtacgattattaaaagttggcttaggcaacttttatagctagactcacctagggggagaagacccaactctccattattataattattataattgaaagggtgcacttagaagaaatggacaaaattcctgataacacaaatttccaaaacacaaaaagaaatagaaaaactaaatcatgtatccattttaatcaccagatttatttgcttgtagcttacctgcaggtttaacagtacctttgaaagcaaatgagtagcctagctgatatttatcaagtcttatagccaccctttacttgtttttcaattagtgtttttattttgaaataactatatatttacatgcagttttaagaaataatgtagagatcccatgtactctttacccagttcccctgaataacaacttgcataattatggtatagtttcacccaggagattgatattgtttcaatccactgattgtgttcagactttccgttttacttatgcatgtgtgtgtattttatacagtgttatcatatgtaggcttgtgtgtccaccagtacagtcaagatatagttctgttaccacagggatccctagtggtggtcttctgtaagcacactccactccccacatcctacgtggccctgtccttaactcctcatgaccactaggttggcgcaaaagttatcgaggtttttgcaattactttcagtggcgaaaactgtaattacttttccaccaacctaatgtgttgcaattactttcagtggcaaaaactataattacttttgcaccaacctaatgtgtttttttcatttctggaacgttgtcatctcaagaacgtttaataaataggatcgtacagactgtaatctttggggactggcttttttctcagcataattctctggagattcatgttgtatgtgtcagttgatcacaccttcttattgctgagtagtattgtatagtatgaatatatcagttttcttaacaattaaccctcttaaagacatgggttgtttccaattttaactcctacaaatttattttcgactgtcttgatttcattattccataacaaaacatagcaacccatgtttcccacagtataatttaagcattttgaagaattctcaaataataagatattaactttctgtatactgtctaaaatatcttaagatcttttcctgagtctctttaaggaagtttgcttgaagaagttgtattccaagcacagtggaacttcctttatggagcaccttggattagattttatcacaactgagaacatgactttttgtggacttcttgtgattttcagataatgataaatgcaatcagatagaagcctgtgtgacttctaattggatcccagggaaaatatatatcctgtagcatttaggagaaaaagtgccttgttcaggggacagaatgccattttcttctgtgagtgaaaaagggtgattgattcattaggcacctagggtcagttagatattcctgttaagaatatcttacaatttgttgggcaaaggttttggttctgacatatccttcattcccttcaaaatgcatttagaatttttgttctgatctttcagcattagaggttccaggcaagataaagacagtcaactctgaaatataaacttgtcatcgatttttttcttaatttttagtttgtgaaatcgtgttctcggaagctcttgtgaaacttgcatatatttgtatacaaattgattttgtgattttaaataatcagttctgttgcagctacaattgctgtcactgtaagctttttctggtagcaatcaatatcagaaagaagtttgctaaattgcagggaatctgctattgctaaggaaagtgtttaatgaatagaccagccattaattgtctcttgctgttagattcaattacctgtgaaactaagcaaatcctgcccacagctttctgatctcttcctgtgtttccaaaatgtcccttcagcaaacatagtagagaaaaaaacgggcaactccctttctagattatttatttaaaacctcaactctgacttgcccactcagatctggtttcattgatacctaagttactgaggaagtgcccctcctccaactcccttcacttacctttgccattttaattagcagattatttaagcggaatggatttttgtttttaaggagcgctgtcagcagtatttacaacttctccaaaccttttaaaaaatactgtagcatgttttaaatataatagatcagtttttaaatacactgtttcaggcctatgggaataaagtctctggggaaaaaaaaaaaaccaacagaggcattaacctaagagacagagtataatggaggctggaaagatttgtcatttatcctgtctgtgctccttcacgatgtacccagattcccacttccttacaccacttctacctcttacacctgctccagccaccccaggattattacagatgcctcctaactggtgtcccagcatcagccccaacccctgcctctccctgcaaagcagagcagccacactgacccttttcaaatgaggccagatcacaccactttctgttcaacactctgccgtggcttctcacatcatttagaataaaaaccacgccctgcagagtcctacacattctggccacgtccaacacacaactctctggcctggcctggcctgcccttgctgtcttcctggctccctccattgtcgtcactgatgaccctcactgttcttgcctgcccagcaggcttctctctccagcaggcttctccctccagcaggcttctctctccagcaggcttctctccccagcagtcttctccctcagactgtggcactttccaagcaagtgccaaagtcttcaggtatctgcagagtgttttctttctctgcccagcatagtgccttccctgagagccctgtcaaaacagtagaactacccaccctgatgtcctagccctacttaccctgcttctctttagggtatataattctccatctatatttaacatgtaaatataaatgtatctgtatgctaatccatttattttctagaatgtaagctccattctagacatttctctacatttctagaatgtctgtcctctgagaggacagacgttctgtttagtgttgctacacagcagactagaacagtgtgtgggagcctagaagtcacttagcaaattcttattgaataaataaattaaccaatctgtgtcccctttcctttatgccatattaatataaaagttacagaataagctacaagctaagaaatcagggaataccaaagctatttaataagcatgagtacagtaaataaattggttttgacaggttattattattaatctagcagtttctggtaatgaatgttaaactcttaccattatgattgtgaagttgtcagtttctctttgaaattaatcagtgttgcttcacatagctcgaagtatattatcaggtgtttataagattagaactatttctcttatggaatgaacattttattataatgacatttatccttgataactacttttgccttcaaatttgttgtatttttactacttttctttttgttgatattttcctgttacacctctttttcttcacaaatatttcaactgtctgtatttgtatatgtgggtttgtctcctaaataagatatttagtgtttttttccccaccactctaaccaactgccttttcatcaagtcacgtgtgtttacatttacacacatgcacaccagtttttttcattatttcttgtcaaattttttttaatgaattcagacatttcttcttcctgtactgtatcttttctttggatgctttgagccctgttgtttttttaattctgtagcttcatactgatgtatcttgatagaggtgtaattttatttatcttgggaagggatcgttgtccttcctaaatatgaagattcttgttttccatcagttatgaaaaattctcagccattatattttcagatattacttaccatattatctctcttctgtccttttggaattccggtgagatgcatgctggccatcacattctgctttccctgtctcataagctctttcacacatttcatttcttagtgccatattctgaggaatttattcagatcattcatccagttcactgcttttcttcacatatatccagtttgctggttagcatatctgttgaaggattcttttttctgactctatatatatatgtgtgtgtatgtgtgtgtatgtatatatgtattttttcaagaagttacattttatatctttttaaatctgaaggtttttacagtagctattttttaattttttacatatcttctttaaataattatactcatgcttatttttgctcctaagtgatagttttatggtctaaagtttaatgtgcctgtggctctgctgtttattgttgttatccactgctgtcatctactggctactgatcacggtagattgtttcctcatgcattttgtataattgtcatataagtctattttcatcacggttttatctgtggcaatcctgtgcagcctctgttgagagcttgtccttctagaaagttttttttttttttttttgcatttgcttcttttagatgccacagggctatcaccaaccaataggctggtccctagaataagggaacatttacaatggctgccttataccctgtacttcaggtgggagcccatagaatggctgtactttacttctcctttctgaaaattaatacaaataaatttagaaatttctgccttcattgtatcccaaggggcccatggaagatacctctagtgaggcctcttttccaatgtcattatcttggatgatcccacactgagttgcccttcccagagggctttattgtcctatgacatattttattttgatgttaattcccctacttggaggttcctagattattcattgaaatctcaatctgatataatatttttggcctgtggttataaattctcaggatggagatatagttacatatccatatctacatctatatatggttacatattcatatctatctttatctctgtatctttatatctatatatatggacatgtaactatgtgtgtatacatagacatatataaatataaatatgtaactatatatacatatagttctagacagataaatagataacggtctcaatctaagttcacacagaaacatacaagttttcttgtgtcccactttcagtgggtgggtatctctgcttgtacaccttttaatcaagtacactatgcttatacttccagtctcctacaagaccttgtatgaagtggcccttgcctatttctcggcatcatttcccgccactgtattcctcttacttctgtgcatcaaccatcttagtcttttttctgtttctcagacataccaacgttacgttgcacttgctgtttactcatagaatgtccttccaccatcttcacatacgtctggcttcttattgtcattcagatcacatatccctgaatgacaggctacataatatgaggacctgcatgcaaaatgaaaatacagggccccttgttaaaaatgattaataatttcaagacagtacaagcagagcactaaatcaaacagagacttctaagcatgaggccatatgcagtcgcaaagattacacacccatgaaaccagcggggccttcctgaccagcccatcaactgcccaaccccacttagtgcttctctattatatcacttttgtagttttttcatcatgacaattgtcactatgtgaaattctttgcttacttattcattggctatcccctggtactagattctaagctctgtgggaatgaggatggctgtgttgtttgctgctgcagcacctagaatggtgcctggttcaataattagtttgtgtagtgagtgagtaatgtctgctttcctaattagtctccaagtagcccaagaatcttcttcaacataagatgctgggtctccacttccagttgatctgattttgcacaaaccagtgaattttggattctaagcccgccctttccttttatagatgaggaaactgaatcccagacagtttaaataatttgctaaaattcagaaaaccagttaagtggcagagctaggaaaagaaaaataagtctgctgacttctaattctaccctctttttcctatgactagtacattgggtgaattttcctgctgtaataatctttgtattcagctacttgacttttaaaataatcttaaatggaatatttcccaaatttgaatcttaattctgtgccaagagaaattagactatgtcatgaggtcagccctctcaagcagattgtcattttctctgggaaaactctcttttgtttatggctgtttgctttatgttttgtttatgcctttgctacctacagcaacttcagttctttctttttttttttttttttttttaatttcctcattcatttattcaaaaatatttatcaagtgaaacactattataaaaatataaaaactttgttttaataaatgattttttttttaattatactctaagttttagggtacatgtgcacattgtgcaggttagttacatatgtatacatgtgccatgctggtgtgctgcacccactaatgtgtcatctagcattaggtatatctcccaatgctatccctcccccctcccctgaccccaccacagtccccagagtgtgatattccccctcctgtgtccatgtgatctcattgttcaattcccacctatgagtgagaatatgcggtgtttggttttttgttcttgcgatagtttactgagaatgatggtttccaatttcatccatgtccctacaaaggatatgaactcatcattttttatggctgcatagtattccatggtgtatatgtgccacattttcttaatccagtctatcattgttggacatttgggttggttccaagtctttgctattgtgaatagtgccgcaataaacatacgtgtgcatgtgtctttatagcagcatgatttatagtcctttgggtatatacccagtaatgggatggctgggtcaaatggtatttctagttctagatccctgaggaatcgccacactgacttccacaatggttgaactagtttacagtcccaccaacagtgtaaaagtgttcctatttctccacatcctctccagcacctgttgtttcctgactttttaatgattgccattctaactggtgtgagatgatatctcatagtggttttgatttgcatttctctgatggccagtgatgatgagcatttcttcatgtgttttttggctgcataaatgtcttcttttgagaagtgtctgttcatgtccttcgcccactttttgatggggttgtttgtttttttcttgtaaatttgtttgagttcattgtagattctggatattagccctttgtcagatgagtaggttgcgaattcaatccccccttggaaataccttgccaattcttactcagaataagttgcattcctatttatattattctcagaagagattctagtcacaaattattttttctgtttactgttttcattcaaagcacgtcagcaccaattacctttctgcaaaaatgccaaggatttaaagttatattacccatttgggaagctcaatggcagttttagagttgccctgattttttattgtacctagaagattgggatgggtccagctatcacaataaacattacatatatgtttacttggcaaaaatctgcttttcattgaactgcaaaaaaaggtagacatcaatcttcattttgtaatttgtacatatcagctgctccactgcacatggggaacacttcttactctaaggattctgacaggtgacacattattctgttgtaaatttgattctctctgcaccaatcatctgaaagttctaccaagtttcttgctaaggcatgtgaactcatgatccagccagctctcctcagttgccaggctttagtaatgtgaatgtgttatcctgctttgtctcaaaacacgttcttgtataataggcctaactttaaaaagcattcaagttgttccatttcactgacctgcattctctaccatttgaattgctattaattgtacatactgttttgtggtcttgatttttccaatctttttgaccaggtttttagctaacccctggtttgcatttggtttttgcttttgtttttttgggctatcttcttgtttactttatttgatttactctactctgccagttctaagggaaatgaagcttatttttactataattttagaggttattctgggtggatttctgtaaaagtgcgccgtgtagaggatcctaatggttgagattaaagaacagaacagactgagcttagtggctcatgcctgtaattccagcactttggaaggtcgaggtaggcagatcacttgaggccaggagtttgagaccagcctggccaacacagcgaaaccccattgctactaaaagcacaggaaaaaaaaaaaaaaaaaaaaaaaaggctaagcatagtggcacatgcctgtagtcccagctactcgagagtccaaggtagaaggtaggagaatcacttgaacctgggaggcggaggttgcagtgagctgagattgcaccactgcactctagcagcctgggagacagagtgagactctgagtctaaaaaaaaaaaaaaaggaaaaaaaaaaaaaaccagaacagtaattcttcaggtggctgtattatctgaagtggggataatggggagaagatggtaggattgttcaaaacaagcaacacctttgttttgttactctaatttattttggagacaatttacaaattataattttaatgtataattataaagctgttgtattatttcataaaattatttttatattatataaaatacataatagtgcattaacatatgtttatacatcattataattaatatataattgtgtttatacaaagtattttgagcttcatttagtactaaaggaatgtaaaagatttttatgtttccaaaagtgtcatgagaaatgtcccagaaggttaagaaagactggaatggatgtgatctgtctcacgagtctttcagcactagcccgggctgttccagggaggctgtgcttgccctgccacgaggccaaacacaggagctggagggcctgctcaggacagaagcacttgctttacagttagaaacagttgaagcgctcttatgcgtaataagtatgttgtaaatttttgatgaattaatagttacttggggatctagattttagtttactgttcattaaggtatctccttttgctttcagttacttattcaagttaattgatcttcatttaatattccaaagcccctatattactcatctattgctatgccacaagtgactctaaaacttaacaacttcaaacaatgaacatttatgtctcactcagtttctctgggtcacaaatccaggagaagctgagctgaggctctgtggtggtatctctcatgagattgcagtcctctgaaggcttaaggggagctgaaggatccacttccaaggtggcttcctcgtgtgcctggcaggttaatgctggttgttgtccgacaggccttaatttctctctttatgtggagttttccattgggcagcttggctgtcctcataacatggtagctagcttcctccaaagtgaatgatccaagaaagagactgacagacaccatcatatctttgatcttagcttctgaagtcacacttcatcattccataatatcaaattggttacacaagtcaaccctattctgtgggagctacacaagggcatgaacactaggaagtaagatcactgggggatattctggaggctgactcccacagcccctaatgaagatctcattagaagtattctttaattaaaacaataacttttatgtttacatggatagaatatataggttgaattacgaccggttttcagtatgcatccgtgtatgtgtgtgtgtgtgtgtgtgtgtgtgtgtgtgtgtgtgtgtgtgtgtgtttaccataactggcttataacatgtatccattagcttttcattttatttgaaagcacacttgcatcttggaatatgatgacattatctgcttcatatttatcattctcacagaataaaagttaccaatgagagacaacaaaagggacgaagttgtcctcataatctatgtgaaattgactaaaatatttagctactttacaagagatgggttattggattagctcctcattttgtgtcaaatcaccacttatatattttcccatattgctgttatttatgaaaatagaaaaccatattctgctagagaaccaacatataaatgagaaaaatactgtgctgaaataggaaaataggattataattatagctcaggaaatgcaagtcagaaatccaaaataagttcagtgtatgctgaaaatgttagcatttttcaatgtacttaaagataattacattgcaaacataatacagtttttaccattgtttcccagctgaaaggtttaggtatgttggcgtgcttactttaaatcaggcttgcatgcttgcttgaaatcacatgttgttttcataacatcagaatttttacaaataacaaaatgaatagttttcattaaccagtacttactgttgaatagtttccattatcgggtgcctacacaagttatcaaatagtactttttaggtaattataagttttttaaaataaccaaaaaacactcttttacactgatgtcgaacataaaacaaattatttttctaataggatatttggcaatatgttttaaaagacttaatgtccacattctttaataagcagcttcacttctagaaatgtgttataaggaaataactagagaggaagtcaaaggtgcataaatgtccatggcagcattatcattattaaaaatagtacaaaaccatctagcaggagaatggtaaaataaatgatgctacattcttattgttagttggcatataggctgaactgctgaaaccaaaagacccatctaaacaaagttgatttcaatcatattatattctaggaggtttgctggctgtacagcacaagattatctaaggcctgggtttcctctcctttttcagtagtgactagggtattatactttctagcttctgccagctcactatcactaggaccttgtgccagctcccagctcatgggaatggaaaaatggaaaaaaaggaaaaagtgggcaagcagcttgcttttaaggaaatggcctagaagtcttatacctcatttctttttttgtttgtttaggtttttttttttttttttttttaagatgggtcccactgtgttggccagggtgatctcaaactcctgagctcaagagatcctcctggttcagcctaccaagtagctgggattacaggcatgtgccactgcacccagaattgtaccgtatttctgcccacattccaatggtaaaaatttagtcacatggtcacactcagatcagttaagatgttaagggctaccccctacatcgtgggagtgaatgaaatatgaaaattgccatgcataaccttggaaacatgttaggtctagtaccagttacaaaaggtgatatactgtatgattccattaatatgaaatgtccataataagcaaatccatacacagagtagattagtagttgccagaggctggggggagaagaggtttgggagtgactgctaatggctgtggggtttcttttggggctgatgaaaatgttctaaaattaggtagtgatgatggctacacaactctgtgaatatactgaaaatcactgagttatatgctttaaaaggatgaattgatgacatgtgaatgatcccaatacaactattataaaagaaaaaaatgccccaatgcataaaaggacagcaaggaagtttcctccctcagccatggcttggatagagcaggacactctaccccaataatttaaaatcagaagtcagcccttatgtggcctgactttatgtttcccgtgcccataaaacttctagtaaagatttactcgaaagtagctctggctctgcagcacctccaggtgtctagcaacagccaatgtaaatcttctctggaaataacaatgtctatccaagcccaaatcattccatagataaaagtccaaagaaaatgagtaactcatgacataaaatataccagggaactaggcaccatgagtaggaatcagtgaaacacccagtcatcagctggacctgcaaagattagaggtattggatttattagacaaatataaaatcactgtgtttaagatatttaaaaaataaaagagaattttggaaatatgagcagacaataagcagatttataactataattataaaaattctagaaaagaaatatatgataaattaagtttaaaactgtgtagatttatcagcagatttgactcagtagaattagtgaactgaaagacggatatgaaaatgtttcctgaatgaaactcaaagaaacattaaaaaaaagatgtgacacacacagagagagagagaggtggggggagatcaagatataagagacgttaggataataagtttagcgtactccaaatgatagttctagaaagatagaatggggaagaggcaatatttaaatgtatgataactgagaatattcccgaatttttgaacccatggctttaagaagcacaaagcatcccagcagtaagacaatatccacaccaaacagattagaatgagactgctgaacagcaaagagaaggagaaaatcttaaaaaacagctaaggagggtggaaaaagaaatcatcttcaaggcaagagcaattagactgacagctcatttcttcagaagagaatttaattttatccttcatgcgtggagagaaaatacacagttaaaaaccttagacaaattaaatttaacagagtttaattgtgcaaagaatgattcgcaaattgagcaaagaatgattcgcaaatcaggcagcccccagaaccagaatatgttcacagccactccaggctgccacatggttggataacatttgtggacagaaaaaggaaagtgatgtacagaaaatggaagtgaagtacaaaaacagctggattggttacagctctgcctttgccttctttgaacctgcctttgccttctttgaacagttgtctgtggttgtctgaagtttggctactgcgattggctgagacttggctacttgttacaagagtaggttacagtctattttatacatcaaattgcgttatagttaattatgtatggggaaacctttaggcagaatttaaaatatgtaaagaggcagctctaggccaaatgtaatttaacaataccaatttataattctatgcccagtgaaaatatctttcaagtaactaaagagtgtctgtcagaaattcttggaatctcaaaatgcaacagaaaatgtatattattcaaatatcaagaataagggggttttataggggaaaaacacaaaagcaacaaagggagagctgcaagtttggtggacactgttcaggcaactcttgcaattttgcagaagggaggttttgttttggttttttttttttttttttttttttttgcaatttggcccattccaggccatacatcaccttctaggaattgctagctcaaaagagtaatttagagggagtgtgttactttctcagtatcagagaacaagaaagtaggtattaggttcagagcagaaaattttacagttctccacatccctcttcttggccaaggtggacaaaaatccaacactgaccaaccataatgagctcactgagataaaagtcattagaatgggagggtgaacttcagagttaaagttcccatttgcttctgttcaagataatgttctgggatcatttattttgaaattatgtcactgcttagattaatgaccctagaaattatgcatttcatgggagggattcctatgaagaggaaaagcaggtgcatgaataatctggagaattgttcagagccaagactcggtttctgtttggaatgcctaaaatcagaggtcccagctccatctacctaacgcaatatatatcctagtaagggccaggttgtccatgcagaagagattctggttggcttcacgttagaaatgttctcagggatgcacatgcagaagtcatttccaagtactatacaagtacccccactcaggaggctaagatgggaataatgttgttgtggttatttacatcctttgcaattccatatgaattttagagtgagcttatattgctaagatttttattggacttacattgactctatagatcaatttgggatgaattgatgtctttaccaataaacccataaacaaggtacatctctgcatttatttagtctttaatatttttcagcaatggtttgtagtttttaatgtacaattttgcacgtcttttgtcagatttcttcctaaacatttccttttctagtgctattataaatagaattttctttaattcaatgtccaatgattgtagtatatataaatagtatgtaggttttaatgtgccaatcttgtaaaatgcaaccttgctaaattcactgattctttttgttgattccattagattttctacatatatgatggtagtgtttgcaaactgtaagacttttaatagacaatatagttttatatctttatgacccaaggaatgtgaaagattttgttaaccagtcatagaaaacacagggcataaaggaaaatgtagatatatgcctacttaaagttcataactttggttcacaaaaagataccatagagaaagtagaaagagaagccccacattgatagaaatttgcaatacagttgaccctagaacaatatcggtttgaactgcgtggtccacttttatgtggggtttttttttttcattaaatacagccagccctccatatcagtgggttctaaatctacaaccaaacaggaataaaaaaatacagtacttgcaggatgcaaaacccacatatactttggtatctatatctgacttttggtatctgtagggccaactgcaggacttgagtatgtgtgggttttggtatccacagggatcctggaactagttccctgatggatactgaaggtgactgtatacacacctggcagaggcttagtatctagaattgtgctgcccaaaatggtagtcacaagtcacatgttttgaggacttgcagtgtctcttatcccaaatacatgccagatttcaaagacatagtatgaaaacaaaagaatgttgcctgttcactctgatggtagtttcttttgctgtgcagaagctctttagtttaattagatcccatttgtcaattttggcttttgttgccattgcttttggtgttttggacatgaagtccttgcccacgcctgtgtcctgaatggtaatgcctaggttttcttctagggtttttatggttttaggtctaacgtttaaatctttaatccatcttgaattgatttttgtataaggtataaggaagggatccagtttcagctttctacatatggctagccagttttcccagcaccatttattaaatagggaatcctttccccattgcttgtttttctcaggtttgtcaaagatcagatagttgtagatatgcagtgttatttctgagggctctgttctgttccattgatctatatctctgttttggtaccagtaccatgctgttttggttactgtagccttgtagtatagtttgaagtcaggtagtgtgatgcctccagctttgttcttttggcttaggattgacttggcgatgcgggctcttttttggttccatatgaactttaaagtagttttttccaattctgtgaagaaagtcattggtagcttgatggggatggcattgaatctgtaaattaccttgggcagtatggccattttcacgatattgattcttcctacccatgagcatggaatgttcttccatttgtttgtgtcctcttttatttccttgagcagtggtttgtagttctccttgaagaggtgcttcacatcccttgtaagttggattcctaggtattttattctctttgaagcaattgtgaatgggagttcactcatgatttggctctctgtttgtctgttgttggtgtataagaatgcttgtgatttttgtacattgattttgtatcctgagactttgctgaagttgcttatcagcttaaggagattttgggctgagacgatggggttttctagataaacaatcatgtcgtctgcaaacagggacaatttgacttcctcttttcctaattgaataccctttatttccttctcctgcctgattgccctggccagaacttccaacactatgttgaataggagtggtgagagaaggcatccctgtcttgttccagttttcaaagggaatgcttccagtttttgcccattcagtatgatattggctgtgggtttgtcatagatagctcttattattttgaaatatgtcccatcaatacctaatttattgagagtttttagcatgaagggttgttgaattttgatgggagaaaatttttgcaacctactcatctgacaaagggctaatatccagaatctacaatgaactcaaacaaatttacaagaaaaaaacaaacaaccccatcaaaaagtgggcaaaggacatgaacagacacttctcaaaagaagacatttatgcagccaaaaaacacatgaagaaatgctcatcatcactggccatcagagaaatgcaaatcaaaaccactatgagatatcatctcacacccgttagaatggcaatcattaaaaagtcaggaaacaacaggtgctggagaggatgtggagaaataggaacacttttacactgttggtgggactgtaaactagttcaaccattgtggaagtcagtgtggcgattcctcagggatctagaactagaaataccatttgacccagccatcccattactgggtatatacccaaatgactataaatcatgctgctataaagacacatgcacacgtatgtttattgcggcattattcacaatagcaaagacttggaaccaacccaaatgtccaacaatcatagactggattaagaaaatgtggcacatatacaccatggaatactatgcagccataaaaaaggatgagttcatgtcctttgtagggacatggatgaaattggaaaccatcattctcagcaaactatcacaagaacaaaaaaccaaacaccgcatattctcactcataggtgggaattgaacaatgagatcacatggacacaggaagggaatatcacactctggggactgtggtggggtggggggaggggggagggatagcattgggagatatacctaatgctagatgacgcgttagtgggtgcagcgcaccagcacagcacatgtatacatatgtaactaacctgcacaatgtgcacatgtaccctaaaacttaaagtataataaaaaaagaagaagaagaaaaaaaaaacactgtacacttaggctatactaataaaaaattctttcttcaatgataaattaaccttagtctgtcaaaaaaaaaaaagaacacaaaagaatgcacagaatcttaataatttctatattgaatatatattgaaattaaaatatttaggatatattgggttaaataaaatatattactaaaattaacttcacctgtttccttttactttttgaatgtggctactagaaaatttaaaattatatttgtggctcatgttgtatattaaagatatcctgatttataatatatctggacgttcctatgaaccaatcagaaataggcaaactgtccaattggaaaatgggaaagaatagacactctataaaagcagatacccaaatggccaataaatatgtgaaatgggggctcaagctcttaattaatcaataaaatgcaatttagaacgatattggcataccatttttatcaactaggttaatggatacttaaaaaagaaatgttggctaggttgtagtatagagttctctgtcttctactgctagtgagaatcttaatggtttcaacttcttacgacacagtttgtattatctataaaattgactgtgtgcacatactctataatccagcaattctatttattctgttttcccatatttattagagaaacccttgcacacatgtacctggagatatgttaaaaatatgtgcatagcagcattatttgtaattttaaaaactggaaatgagtagggggatgtatacatcagggataaactgatgtattttcataaagtgtatatcatgatgcactcaaaataaactgtagctaaaggcatctacctgaatgaatttcaaaagcataatattaagaaattaaacaagtaataaaataaatcatataataatccattaagttcaaaaacaggcacaaccaagtgatatgtatttttaggagtacatgcgtagaaaatatcctatacagaaaaacaaggatataaataacacagaactcatgatggtaattatctctggggccaagggagggatcctatcagaaagtggttcacagagagcttctaaaatctgataatgatatagttaataagctgattggtgagtaaatcagtgattatcttattatcattctttaaagtgtacatagataacttctttgtatgtataacagactttaataagttaaaacaaactacaaaacaactatggcatcaatccgattttgtttgcgcacacacacacagtagatttttaaatacgtattagaaaagaactctaaggaggcataccaaaatatttattttatggtgataagatggctacatgtagatgagtagttgaagtttgagtctggaaatttagattgcagggcaacttcgattgttgagctactttctaatacaaatcagcattctgttaattgtgcctatcaaaatatcagcatcattatattactacagacctgaacatgcaagcttggatattttaggaaaattttagatgattcctaaagttttcacacctgcagaaagccatgattggtccatttgatgtactgtagtcctcccttatccatggtttctcgttccacagtttcagtttcctgcagtcaaacatagtccaaaaatattaaacgggcaatttcagaaataaacaattataagttttaaattgtgtaccattgagtagtgtgatgaaatcatcttctcagtcccacctgggatgtgaatcatccctttgtccagtatatccatgctgtctcagctagctgcaccttaatcatttagtagtcttctcagttatcagatttcctgttgcactattgcactgtgttcaagtaacccttatttgttacttaataatggccccaaagcacaagagtagtgatactggcatactgttataattgttttttattttattattagttattattgttaatctcttactgtgcctaacttataaacatattcataggtttataaatgtaggaaaatgacacagcatctatagggtttggtactaggtatgaggatcttggaatgtatccctcacatataaaggtgaacaacagtacataagtttcctagaggtaaaataatttttgtttatataccccacaacaagtatgagtaatagaatattgtttgtattattatgtaattgtcctagaattcataaattactacattctcattccttggccaaatttctatgatagaattggcagtaccatatattacattagtaccaagtacattttgtaggtgacaatactgctcttttcatcaataccactctttacatgatggattcatggctagcaaacagaagtgaattatcagtaaacttgatgcatttggcctttctgatttttagataacgagaaaattaaaagtaggtctcccagctgtttccattcacctaacatcatgtcatttatttattaacagacaccttatcttgtctcttgcccttgctatttattcatttgcatgctaaaatttatcctaatgttacaaaagataatgcttacattactgaatagaaatgagtaagtttattcatgattgcatgaagagaaaacttgtttcaatagggactgaagaggaagccaaaaaagtatatcaaaatgtgattaaaagattaagaaaagtagtatgcctgggataaataaataaagtgaactgaaggaaaaaaataatctcctagaaatcccgataaaggatttctctctgctttagagaacacatcatatccacagggaatattgtaatgtgtaaaactttatagaagaaaaagtattcctttctgtccttggggctggcagaatgcatgcatttttaataataacaacagtaattactgttattttaatactaatttcatttcatgctaagcatttttaaatgaaaataccatgtctcaggtaggttaagtaacttgatggaggccactggtggaaggtagtaagtggtgaagccagaattcaaacctgggtctgttacactgcaaggcttgtgtgttaacctttgtataaaactagccatataccgaaatccatctaaatttttctgcaacttttaaccagattgagtcactcctgatacatagatcagaggtttaccgtaacatctaggtagactgccttgttttactacattacagaacttcaatgctatttattatttttttaaaaaaaagaaaaaacacagaaaatatgcccatgtctctgattagattcatgtaaaaagtcctctggctattatgactgctatgccaagaacaaaggtaagtggacaaagaactagctcaaaataagtcatttactaaaatctcaattccatcagttctgtctcacagaggaaacagtcattgcacctgttacaggagagaggggatttaaatatagaccacttaaccccttgagtaaagatagtacagagaatgattcacccaccaaggctgagcccagatttaatactgtctgtctaagttcccccaattcctaaaagtttctgactctgattttctgtggtgtggtcagggcagccagatggctttgaccatcctgagccccaagtctgaatatcatgctctccttgtgctttatatgcaagggcctgcttagaatgcactccagataccttgaaaccctcttcccttataagttagaacacatgaccagccccagagagctttctgggtgtattagtccattttcatgctgctgataaagacatactgaaaactgggaagaaaaagagatttaactggactcacagttccacatggctggggaggcctcagaatcatggtgggagatgaaagacacttcttacatggcagcagcaagagaaaaatgaggaggaagcaaagaggaaacccctgataaaaccatcagatctcatgagacttattcgctatcacgaggatagcatgggaaagaccagcccccatgattcaattacctccccctgggtacctcccacaatacatgggaattctgggagatatacctcaagttgagatttgggtggggacaaagccaaagcacatcattccgcccctggcccctccaaatctcatgtcctcacatttcaaaactaatcatgccttcccaacagtcctgcaaattcttaactcatttcagcattaactcaaaagtccacagtccaaagtctcatctgagacgaggcaagtcccttccacctatgagcctgtaaaatctaaagcaagctagttacttcctaaatacaatgaggatacaggtattgggtaaattcagctattccaaatgggagaaattggccaaaacaaagtggttataggccccatgcaagtccaaaatccagcagggcagtctaattttaaagctccaaaatgatctcctttgattccaggtctcacatccaggtcatgctgatgcaagaggtgggttcccatggtcttgggcagctccgcccctgtgtctttgcatggtagagcctccctcctggctgctttcacgggctggcgttgagtgtctgtggcttttccaggctcatagtgcaagctgtcggtggatctaccattctggggtctggaggatggtggccctcttctcacagctccaccaggcagtgccccagtagggactctctgtgggggctctgaccccacatttcccttcagcagtgccctagcagaggttctccatgagggcctcgcccctgcagcaaacttttgcctgggcatccaggcatttccatacatctgaaatctaggtggaagttcccaaacctcaattcttgacttctgtgcacccacaggctcaacgccacatggaagctgccaaggcttagggcttccactctctgaagccacagccagagctgtatgttggcccctttcagctgtggctggagcagctgggacacagggcaccaagtctctaggctgcacacagcatggggaccccaggcctggcccagaaaaccacttattcctcctgggcctccggtcctgtgatgggaggggctgctgtgaaggtctctgaagtggcctggagacattttccccatggtcttggggattcacattaggccccttgctacttatgcaaatttctgcagccggcttgaatttctccccagaaaatgggtttttctattctactacatcataaggctgcaaattttctaacttttatgttctgtttcccttttaaaacagagtgcttttaacagcacccaagtcactttttgaatgctttgctgcttagaaatttcttccaccagataccctaaatcatctctctcaagttgaaagttccacaaatctctagggcaggggcaaaatgctgccagtctcttgctaaaacataacaagagtctgtaaaaatgttctcccattctataggttgcctgttcactctgatggtagtttcttttgctgtgcagaagctctttagtttaattagatcccgtttgtcagttttggcttttgttgccattgcttttggtgttttagtcatgaagtccttgcccatgcctatgtcctcaatggtattgcctagattttcttctagggtttttatggttttaggtctaacatttaagtatttaatccattttgaattaatgtttgtataaggtgtaaggaagggatccagtttcagctttctacatatggctagcgagttttcccagcaccatttgttaagtagggaatcctttccccatttcttgctttcgtcaggtttgtcaaagatcagatggttgtagatgtgtggcattatttctgcgggctctgttctgttccattgttctatatctctgttttggtaccagtaccatgctgttttggttactgtagccttctagtgtagtttgaagtcaggtagcgtgatgcctccagctttgttcttttggcttaggattgacttggcaatgcgggctcttttttggttccatatgaactttaaagtagttttttccaattctgtgaagaaagtcattggtagcttgatggggatggcattgaatctataaattaccttgggcagtatagccattttcacgatattgattcttcctatccatgagcatggaatgttctccatttgtttgtgtcctcttttatttcgttgagcagtggtttgtagttctccttgaagaggtccttcacatcccttgtaagctggattcctaggtattttattctctttgaagcaattgtgaatgggagttcactcatgatttggctctctgtttgtctgttatttgtgtacaggaatgcttgtgatttttgcacattgattttgtatcctgagacttttctgaagttgcttatcagcttaaggagattttaggctgcgacgatggggttttctaaatatacagtcatgtcatctgcaaacagggaccatttgacttcctacccatctaatatccagaatctacaaagaactcaaacaaatttacaagaaaacaaacaacccccaaaaagtgggcaaaggatatgaacagacacttctcaaaagaagacatttatgcagccaacagacaatgaaaaaatgctcatcattactggccatgagagaaatgcaaatcaaagccacaatgagataccatctctcaccagttagaatggcgatcattaaaaagtcaggaaacaacaggtgctggagaggatgtggggtaataggaacacttttacactgttggtgggactgtaaactagttcaaccattgtggaagacagtgtggtgattcctcagggatccagaactagaaataccatttgacacagccatcccattgctgggtatatacccaaagaattataaatcatgctgctataaagacacatgcacacgtatgtttattgcggcactattcacaatagcaaagacttggaaccaacccaaatgtccatcagtgatagagtgaattaagaaaatgtggcacatatacaccatggaatactatgcagctataaaaaaggatgagttcatgtccttcgtagggacatggatgaagctggaaaccatcattctcagcaaactatcacaaggacataaaaccaaacaccgcatgttctcactcataggtgggacttgaacgatgagaacagttggacacaggatggggaacatcacacaccagggcctgtcgtggggtggggggagcggggagggatagcattaagagacataagtaatgtaaatgacgagttaatgggtgcagcacaccaacatggcacatgtatacatacataacaaacctgcacattgtgcacatgtaccctagaacttaaagtataaaaaataataataataaaaataacaagagtcacctttgctccgtttttcaacaagttcctcatctccctctgagaccacctcagcctggaccttattgttcatatcactatctgtatttttgtcaaagccattcaacatgtctttaggatgttccaaattttcccacattttcctgtcttcttttgatccctccaaactgttccaacctttgtctgttacccagttccaatgtcaagttcacattttcgggtatcttttcagcaatgccccactctacttgtaccaatttactgtattagtccattttcatgctgctgataaagacatacccaaaactgggaagaaaaagaggtttaattggacttacagttccacatggctggggaggcctcagaatcatggtgagaggcaaagggcacatcttacgtggtggcggcaagagaaaaatgaggaggaagcaaaaggagaaacccctgacaaacccatcagatttcgtgacacttactcactattacaagaatagcatagaaaagaccggccgcccccatgattcaattagctccccctgggtaccttccacaacacgtaggaattctgagagatacaattcaaattgagatttgagtggggacacagccaaaccatgttactggggaaacttctacacaaggtaaacacaaaggtttcttaacagcagactgcctcttactttgtaataaaagcatagcaagacttccttaagttaaaatatgctttcccctaagatttttgtctttatgtcctaagatttggtcttacttctaggcatagttccatactatgattacctcgaccccaccaagtacaagcccatctagaatccaagatagagcctagatgttgggtaattttcagttcctgtattcacaagacaaccataactcaagattatccattgcttcattgttcagaatattcttcattaccaggtggtagagctgatctcctagacacctctgcaagtacaggcaaatgtcctaaatcccttcctccagggtatgtgagggccgtatatgagcccacccactaacttttgtccattgctaccagatcctttccacccattctaaagagaagcacgacaaatgtctactaatatctcttttatgttgtatgcttgtctatgtgtttgtgtgtgttggaaaataactatgctgttaaaatataacttccaaagttgctctggactataatatggaaattcatagcaagaataagggataaattgaatgacttattcattctctccttacataaaatcgctttgaaaataaggaaacttcaaaactgtgagacaatattttgttacatttgtgaaatggtgaaaatgattccttcattaaacaaatatgtattgagccccaactgtgtgcatgtcactgtactagcccctggggcatagtggtgacaatggcaggtgacgtggaggaggtgctgtggaaggctggagggggcaggccagactgtgcggggctccctcagtgggaagctgggctctttttaggagactgggtgtgacagtaggtgtgacatgattttctttgtgccagtgccaggaacagattagaagggaggatagagtgaattttaatagacctgttaagctattcactcaccgaactggtagaaaactcatctttgatttggaaggattgagatagattttctcagttttacagttttgtttcattgctgataatcagtaaggtgcttcagaactttctatacaaatcaggaagtgagtaaaaaaaaggcaattgcagttaaaatgcttaatctgtgaagctattatgttttcactttagcagtaacttgagatgaaatattgtgaaactgccttacagtttatagttttacgataatgactttccatctcctcattatttacaaagctcttatatgtcagtaactaatggcacaagttctattttaaataattgctgagacactccacatgtattttcatactctaagcagcttctaggggaagtttttttaaaaaatttcttttagttccttactgtcatgactgtatcagagaaaatcattatgtagctccatgttttcgtgtatgtattattaaaagactgcctaacactgccatcttattgcattagaatgactgttctccttgtaatacatttgtagtgttgacatcactactctcaaatgagttacttagtcattgagattgatatgtgatattttaacttctagctcatccaggcatcctttctgttctaattattgttttgagcttttggggccaaatggatactgagtcaaaagagaatatacaggacacagaggcgcagacctgccaagatgctgcttattttaattcctaatgctctttgagaagcattttattctactcatttttggatgatatttcagtggcttacttcactgctgttattaaaaagaatgctaacttaggggagatttcaagcagttttcatttcatctctttttccattcaaattccataaaaagtaagacacctcaagagaggtttccatatatatatctgaactggtaagatgattatgttgaaggagaaagagacagagaatactggatttgaaacactgctgtcactgtgtaatcttggggaagtcactatatttaaaaaagacttatatgcaaaatgggaataatgatgctattgctttgaattgtcatcagatttaaatgaagtaatatatacgaatggtgttttgtatacggtaagtctctatacaaacgttagtcaatttcatcaaatgaggaatttacatctactcaaggacattcctgttgggaacacaactatcataaagaagccacagaactcacacttgatggaaagcagctataaaatggattgaaaagaatccaataaagaaagtatgccattgtttgcatcacgatagcccacagtgataaatcagcttgcattcattctcaggcacctgcagataaacacgagccagagatactgtgcaggcactcttgcagtggaaagaaaataaaatcagaatactggtgtagtttgaaatttttaaagcttaggatgatacagatagatttttcaatgcttatggtaaagaaatgtgtctctccttttaccatcacagacagtcacgttttaaattaaatagacatagatttcttagaggtcaagaaatttcaacagcaaatatatgtcttctctgaggcttacaatgtagtgaagaaattgttgtcagatgacaaaagatcagcctaatgggaagcaaaaaaagtgttttaatttttttaattaacatttacatttattgagctattgactatgtgtaaaatgttgtgccaagtgctggcctatgacgcctggggaaggaaaagggaagataataggtatggtgttctcactgaagtttactatctagtgagggtcataaaagtcccccaaaaaacccagggaaatagaagaattcaggcaatagagtgaaggcttaagtgtagaaaaacatcagttctctcaattggaacttggggaggatgctgcaatcagatggcagtgttaagcagtccttcccgtttcagaaggacatttgagaatgctgcatccaacatactcattttatggataactcaaatgaggtccagtgaggttgaatggcttgccaaagtctcagagcaaaactgtaagaaaaaccagtcttcagttgcaccccgcccataggccacccagctcaggggctagtagccactgagatccaacttatgccagcccttggggccagctgtagggatgactcttcctgggggaaagtgtctcatattctagttgtcacaaaggcatgtattacctacgtcctggttctgactccctagttagttcttttccctgcaattagtggtttttcagatatttcccttcctcattattaaactcttaacctaaaaagtaacccccaaactgatagaaacagagttttcctggaagccctgccaacttaaactcctcctatacccctatagatgttgctaaatggttttgtgttgcagacttgctgtttttcagtcattggtatttaagttgatagccacttgttttggtatctcaaaggatgtccaacacctggggcaatgtatgtatactcatgtgtcaaataaatgagtgaagaaatgaatgacgaaaagacaatgagttcaatagagtctattttactggttgccactgatttaataatttaatgtaataatacgttaataataactatttaatgataaaaccatttttaaaccaaaataacacaaaataaataaaattaataatataacttatcaagagataaagttatttctttggaaccgggttatgagtggccctcacatgagtctgttccaaagaaataactaacttcgtccctgtgatatatgcctttgtgacaactagaatatgagacactttcccccaggaagagtcatccctacagctggcccccaagagctggcaataagttggatctcagtggctactagcccctcagctaggtggcacatgggcagggtgctactgaaaactggttttgcttacagttttgctctgagactttgacaaacattcagcctcactggacttgatttgtgccctctataaaatgagtacgttggatgcagtgttctcaaatgtccttctgaaatgggaaagggtctcttgtccccctcgcagggtgtgtgatgggggtgtggctcacttcttcaccgccctgctgctcaaacctctaggggagcatacagatgggcaggctgtgggactccaaccccatggcagtgtctaggggtgaatgtttacagctgaagccccagtgggcgtgtgttacagggtgctcttttagtttagccatccataggtagctcgtgttagtcagctcaattagacccctgccttactgcagggacagagggctttctgtatcctagggatcttgcctctgtgtaccagaagaatcagatcacacgtggacttggagaatgagtgcaaggttttattgagcaggttttatttactcagtggactgggctctcatccgactgccccagccaaactccatgtcattctgccactcagtggcctgctggcatgccgatgcctgttggtgcgttcctctcgacggccagccacctgtgtgtgcctccattgatgtgcttctctcgacatccagccacctgtgtgtctccctgctagggtctcggggtttttataggcacaggatgggggcgtggcaggccagggtggtcttgggaagtgcaacatttgtgcaggaaaacaaaaatgcctgtcctcacctatgtccatgggcccgggccctgggtggagccctagtcagggaccacgccctcctctacctagcacttcccttccatatcatttaaagggaccatgcttttcccttcccagcacttcccttctgtatcacttctctgctgtagatttctataattttaatttgatgaccttcatctaaataaactcattttatttatcataactctggagtcaaaacatacaaatgaacttatcctgagtttgttgctattatttcaattgactatttccctgcctttactcagtttagtccggtctcttcttttcacccaaagtccctcatatgattggctcattatggcaagaaataaaaggaagcgggaagaaaggaaagtgaaccataagtacaatatgaaaaactaagtttgttttttcttgagtgacaaggacgcagattccgaatatgattccaaaaggaattccagaaaatatgagcagtatagtacagcatagttggaataagtattaatatattacctcccatagcaactatatggggaaaagccatcttaattttttatgccatgtctataaaaaattgaaaaagaaaaaacccataggaatggagttgtgttgccaacatagaaaaacctgtggggttttattaattcaaaatcaggatcagtactgtcttagaacctagccatcactttgttataacttttcatgttaagcagaaaagagacatgcttgatttcctcagttaatgaaagttttacaatataggtgcataggaaagttaaaaaaaagaaagaaaaatgtctcaactccacccatccctacctcatggaaatctagaatactgctcagcagactggcagcagtctgtgtttggtttctcttctatactcttctccatcactgtcaactccgtgacccttctttacctcatggcttctattgcagtatggcctctgcctacaggcttctctgtcattcaacttctgtgtcactctatcctctttcaatatttcatattctgacttctcagagaatataaaccatatgccacatcattctctggtatacagcacccaccccttgccaagccgcttcctagggcactgggcaggctgttggtggcctttatgccacacatagttatggccaggcaggcaggttttgcaggggagcactaccacttgtgcttggtggcgagggggaccactcagctgtcggcagaggtgggccccacagctcctaagcggggaagcagtgtgtagtataaatatggaaaccagcattttgaggcctttggtcaatatgaaggaaccgcacaatggagaagatgcataattcccttcctttcagtgccagttgaagcaggagaagggctaataactgtaatgcctgactgtattatgggaaaaattgtaggggggaacagcaatatggaagaagaagccccagattagctgtctatgagtcactaaactttctcccatcttctcaaattaatactgtcacaactacagtttcagtattcctgatccaaaaatctaaaatccaaaatgctccaaaattccaagctttttgagtgctgacatgatgctcaaaggaaacgctcattggagcattttggatttcagattaggggtgctcaaccagtaagcataatgaaaatattccaaaatctgaaatctgaaacacttctggtctcaagtattttgaataagggatacacaacctgtataagttcaaccatgaaaacaatcattaagtaataaattaccttctcctcccctaattttttatatttccagtcactcttatccatataacttattctctggcagtatttgtagtttgatatcttacccactccaactttgtgacatcttgtttgtttccaggtagactttatgaagtaggccatggccaggcttgctttggatgtgataatggaataagagaaagaacttcaaagtattttcttatgaattaatagagtctaaacattttcttagaccactcaaatgctaacgtggaccctccccaaggcagagttcagggctcctctgagcccgtagcctgttaacttcacaatgaccagagaacttcaggaatacaggaggaactggagaggcagaagtaggccacatccacatcctcatgtcctggattttgcatacacctattgccttgcttgttggccagtttggtgccaaaatgaaagtaacttacgttacctaagacttcattttcaccagtcttctatccagaccaacctttgtggcccaatttactttaaaatgattattttaatggctgcttttttattcagttgtaccttaattgcattaactacccttccattgtgggagacttttatggtttctaattctctatctatgttaatcttgtgataaatgaaagcacagagaaaagtacatcttgaagcatataatttcccatttaagtggtttcctaaggatacactttagatatcagactgagacagaggggatgaatattctaatgttcaaattgccaaatttctttccaaaaggaaattatatcaatttaaattgttaccagaattagagactgtaccactattgctatagtctcatcacctttaaatgttatcattgttttaatttgcatctgtccatactccatccatctattttgcatacttggggtatataaggtagtcaatataccgataaggagtttagatgcaatgatttatagataaataatattttattcaggaaaaaagtggctttttgctccaaatttctaaggcttttgaaatttacccatatctatgatttaattgtctcaataaagacttttttattagaaaataatagtaattaacaaaagaataggtttttcatcttgtctgtaaatgacaatcttctgcaggaaaattacaaaaccaaaaaaaaaaaaaaaaggctggacaatgggaaatcattcaagggcaggattttcaacatggtctccacactgcaagctaggaaaccatacttttctaaaattattcaaaatcacagagatgttattagagtttaaatgctatgtggccacccttgacataagtttatttcattttagattattaaataggaaatatgcctactgaacaataattaaaagtatctgagaagtaatgggccaagtttgtaacagtaacttttcatggttgctttgaagggatgcccggaagttagaatttcttataacttgggttgcttagagtaaatttacaccatcctaaatctctggttgggaattaggattttgcttctttagttctcctcagataagagtgaaggtgtcctatcctggagagatactctgtgctttcctaggtacgttttcaccactaccctcaaattgtaatggtgtaattatatcataaatttctatcaataaagaactattagggttaactttctatcaacaaagaactattagggttaacttttagagggatatctatgttttgaggtgatagcttagggaccttgtccagaaaaatcacagtcctgcgtcaggaactggaaataaaatcgtgcttcactgacactcctcagtaatgaattagcaagcttgtgcagtaagcccagtagaacgatggtagatgtgtcacacgaactgtagtaagctctccccttttctaaaattctggatcttttataaactctttgggaagggaactaagtttcatacatttatcagtgattaggactcaatatatgaagttggaagttttggtttttatacacaggtcatatttcttttcctctactcccatatataagcctggagcagtcaaattatttcatcatggagaataaaggggcaatatagacagcatgtgctgtgtaggaagcaaggaatatactacttatggctaactagcaagaacagttgtatatttgcactgcttaagttcctttggttatttcttaggtttgaaactctaaagataaatgatggagaggtaacattttaaaaggcagaaatagatctacgtatgaactaggtttggtgggtgttgagtgggcaggggagcattgttccaccttcaaagggagctgttaatttctacatgttattactaaagggagttctgtgtattccatgattggaacagggaaccgattatttatttggtctgtatatcaggttttagcctagtcattctgctggtaaggattagttctctcactcagccaaaatgagacatatttcacctgattgcatgcaattctgctgctttgtccactgcagtgccctctgagcagcttcccattattgcagtcattttcaggttttgctctaggatgtggtgaaaaggtgccacatccaagagcatgactttttctaatcccagcccacacactgatgtcaaagtatttttgttccttttcgggagcattatgttcttctaccagcagttgccaggaaagcatgaggatattttgcaataatgtttgaaatctgcatttttattttttagttggtatttctagtgtttatattttgaaggtcaggtgtgatgtcacattctcagtcattagctatctacgtattgctgagtatgtaactctgccaagttagtgcctgcagtgccttcccaaaatcagcatgaggatgatgaggagctacttggccttttttttgcacatgtaaacgtgcatagccagatggcaaaaagcttcatcagggcaagcacagagtccactctaaagtatcctacttcattgccacagcaggagatcaccctaggaactgtgataataacgaaaagagtaaatagaaaattgttcagtgaatcttagttatttcattatttgtaagtattcctccttacaggagcctgcctacctgcctgcctttcttttttctttcttcttctcttttttctttcctttcctattttcttaaatcttcatgactcaaaagactatttcattgctggggattattggtcaagggacatctaatgctgttttctactcacaattaaacaaatgcaaatgtaaaagcttcatcattcaaggaacatttatctctacatagggtattatgatggacaataggttgagatttaaaaaaaaaatagcacggtgattattcttttggcaagcccttataaattgctttctatgtgccaagcagttatcaccttgtttaatctttgtaacaaccctatatggactcttattttacaagaaaattgagacacagagaggttaagtaacttggccaaagttacaaagctggtaagggagagaactgagatacaaactcatgcagtctgacattagaccctgtgctcttgacccttgtgccatgctgtactccctgggatgaaatctcagtaccgtagaagaaggagtatattaatatatgaccatacagagcactatatgataatgacataaatgaggaaagtgaaaaggagttgagaggaggagagaatatctcggacaggtgaatgggtagcatccacacaggccttgggtgatgaggtaggaattgatggtagatactgacagtagatatcaagagtaagagtttgccttcagttacaggaaacgtcatgagtaggagatactgggtctagactgtaggttcagaaaataagtaatttagtttagttgcataaaaggattgtgtacaggagtacaagataaggtaggctgcagccacattttgcaggccattttgtagactgctggaataaggaggatggaggtttttgagcagtgaggtggtcagggcgcttaacttggtggcatatgagtttgaagaaaggaatgataggagcaggaaaatcaggaaactgtattcatttactactgcaacacacattaataatatagcacttcctgtgggtcaggaatgcaggcatagcttaggtgtgtcctctgcttagggcctcacaagcctacaatcaatgcacagactggagctatggtttcctctaaggctcagctggagaaggattcatttttgttagcagaattcagtaatttgtggttttgtgctgaggacttcagtttcttgcttgctgttggacagaggctgccctcagttccttccacaaatctcccagcataggcatcctacagcatggcgacttgcttctccaaaaccagcaagggaatgagagacttcagctcaacagcactggaatcttacttacttaatcacatatgtcctgtcacttttgccatattctgttggtcggaagcaaatccaaggtcactcccacactccagaaaaaggaactacacaaggcatgaaaatcagaaaataggaaccatcagggttactctagagtctctctcccgcagaggcagaggcaggtgatgggacacacactcggagtctaaattaggatggtgttaatgcaaatagaaaagtcagattcaagaaattatgtctaggaaatatggtttcttgcctatatcatgtgaaattctttgtgtacgttctctaacataagcatcaaaatagccttttgaggtaggtaccaggaaaatccttatttcacagatgatgacacagctttgagatattacacctagaggccacatatatcctaactttacctgggtgtcccagcctagatctgaacctaggatgtcaataccaaagctcctagtcttggccacttttctttacttggacttaaaagtataaaggacctaagagaagtggataagaggaaaatgaaaataactgcaagattttaaaccattccaatttagggtaaggtggtgttaactaaaatagaaatgtcatgaggggcactagtaaagtaatacttatgctatgcatataccacatgccaggcagtatgctaagcattgagtgtgcagatgctctatgcttatccagatgggaatatttaatgttcccaacagcccatgatacagttctttccccgatctcacagatcaggaaacaggaccatgccagtgcccgctaaactcaaggttctacaaatgcactggttggtattttgttcataactgttattgctaatgtctgatgcataaaaagtgctcattatataagcttttgaatgaatatggctattaagtggtagagtcacgatttgaactcagagcagccccatgctgccttctggagaggtcatttcgttgtagtcatattgcatttgaggccatggcaggatctagatgttcatagcaactctgctattttaggtacttaggtacctaaattccatcagtggaacttggaagaaagatcaaggccagaataaactattgaggagcatccacatggaaattataaagtcctaaaattagatgagatgattatgagagagggtataggtcccaaaatagaaccttagaggacacctatatttagaggttgagaagaggaagaggcaatttaaaaagcaatgaatacatataggtcagagagctaaaatggagatacagatataaaagcaaagagggaagagaaggaaggagagttgtcagcaatgtcaagcaccacagagtaatcaaagagcatcaagattaagacaagaaacctgaatttgtatgttaggagctaattgatgacttttgtttgaacacatccaggaaaaagaccacataaaagttagccagcatctgggagggtgggagagttgggctgtgaaagaaggattgtgtagtcaggtagagctcgtgagtataaacttctggtatttcaggagagctagttgtggtaatatgagaggagttgaacatttgagtaagagagatcttgtgtattgtagacagaagggaaggctcaagtaggatgaaactaaatagggcaggaaaagaagagatattgatggaacgtgaccccagaggaggcaggagaatgagatgcaagaacactgataagaagggcagtcctcagaaagggtgacagacttgtaccaccggagggaggaaggaagcctacaccctacaatgttttttaaaaaactttcttttctcaaatattgagagaaaaatatagaaaagtagaagctgatagagaaaaattgatgttcaaagtaatgatcttcaattcttttaaaagaattccagttgttaaaagatctgttcttcagattcaaatgtatcaagtcctacaaagcatctccaaattcctggttttattttatttttctcaactgaaattgataaatcttccaaaaaaaggaggtaagttcgtcacataggaaacagaaggaaagatttcaggattacaagatagtaagaaatattttaattaattgaggcaatagttgacaaaagtttatggaatgtctactcttagataagcagataattcagtagagaagacaataaaggataaaataagcatcattagggaaccaactgagataaaatggcatgaacttttaatacagcccaacagcatggtttcataacactgctcagtttctgagaagtggttgttgaaagaagttaataagccacaccgggttgggaactcaaatggtgaaaaatggcagacaaaaatagaggaagaatggattctagaggctagtgaagacagtatatacttcattttattgtgtttgccatcattgcacttcacagacattgcattttgttttacaaaccgaaggtttctggcagccctgcatcaagccagtctattgtcaccatatttccaatagtatgtgctcatttagtgtctttatgtcacattttggtaattctcacattatttcagactttttcattatcatatctgctatgatgatcagtgatctttaatgttactattgtaattgttgtcgggcatcacaaactgcacccgtataagacgtcaaacttaattataaatgttgtgtgtgttctgaccactccaccaaccagctgtttccttctttgtctccctctcctggagcctctctattccctaagacactacagttaataactctacaatggcctctaaatgttcaagtgataggaatagtagcacgactctcactttaaatcaaaagctagaaataattgagcttaatgaggaaggcatattgaaagctgagataggctgaaagctaggcctcttgcaccaaatagccaaattgtgactacaaaagaaaattcttaaaggatattaaaagtgccactccagtgaacacacaaatgataagaaagtgaaacagccttattgccgatatgaagaaagtttgagtggtctggatagacgatcaaaccagccacaacattcccttaagcacaagcctaatccagaataagtctctaattccatttaattctatgaaggctgagagaggtgaggaagctgtagaagaaaagtttgaggctagcagaggttggttcatgaggtttaaggaaagaagctgttttcacttcacaccttgttgcaaggtgaggcagcaagtgctgatggagaagctgcgtcaagttatccagaacatctacctaagataactaataaaggtgatgtattagtctggtctcacactgctataaataactgcctgagactgggtagtttataaaggaaagagatttaattgactcacagttctgcagggctggggaagcctcagaaaacttacaatcatggaggaaggggaagcaaacatgtcctcttcacatggcgacaggaaggagaagtgccaagtaaaaaggggaaaagcccattataaaaccttcagatctcatgagaactcactcacaatcatgagaacagcatgagggtaaccacccccgtgattcaattacctcccactgggtttctcccacaacgtggagactatgggaactacaattcaaaatgagatttgggtgaagacacagctaaaccatatcaggtggctatactaaacaacagatttttcaatgtagatgaaactgccttctgttggaagaagataccatccaggactctcatagctagagaggagaagtcaatgtctagcttcaaaggacaggctgggtctcttgttaggagataatgcagctggtgacttttaagttgaagccaatgctcatttgccgctccaaaaatcctagagcccttaagaagggctaaatctattcagcctgtgctctaaaacgaaacaaaaaaacctggacgacagcacttatatttacagcatagtttggagaatattttaagccactatggagacctactgctcaggaaaagaaaaaaaagattcctttcaaaatattactgctgattgacaatgacactggtcactcaagggctctgatggagatgtacaagatgaatgttgttttcatacctgctaacacagcatccattctgcagcccatggatcaaggagtcacttcaactttcaagtcttattatttaaaaaatgcatttcataaggccatagctgccatagatagtgatttctcagatggatctgggccaagtaaagtgaaaatcttctggaaaggattcactattctggatgctattaaaaacattcgtgattcatgggaggaggtcaaaataccaaatgaacagtttggaagtttgcaagaagttgttccaacctttatggatgactttaaagggctgaagactttaggggagaaagtaacttcagatatagtggaaaacagcaagagaactattgtagaagcgaagcctaaagatgtgactgaattgctgcaatctcatgataaaacttgaacggataaggagttgtttcttaaggaggaacaaagaaagtagtttctgagatggaatctactcctggtgaaagtgctatgaacattgttgaaatgatatcaaaggatttacagtatcacacgaacttagttgacaaagcagtagcagagtttgagaggattgactccaattttgaaagaagttatctgggtaaaatgcatgctacagagaaatatttagtgaagggaaaagtcagtcaattttgcaaacttcccagttgtcttattttgagaaattgccacagccaccccagccttcagcaactactaccctaatcagtcagcagccctcaacattgaggcaagaccctccaccaaaaagatgatgacttgtgaaaggtgcagatgatcgttagcattttttatcaaaatattttaaaattaaggtttgtacatttttagacaatgttattgaacacttaatagactgcactttcatgggaacataacttttatatgtagtgggaaaccaaaaaatccgtgtgacccactttattgcagtggtctggaactgacctcgcaatatctccaagctatgcctgtattggcgtggtctaagctgagcagtgaggtaaacgaatactgaaaggataatccaaaggcagatctgggtgtagcacagatgatcagaaatgaggagataaacaaagtggtggttgtgatcagaaaaggaaggctcaaagtctgaagtaaaatagttccaaatcaaggaaactataaagtgctgtctctgtagtgttggagattaaataaggaactatgaggccaatgcattatacggagcacagaaaaccacacactgcgtgttttcacatataattgggagctgaacaatgagaacacatggacacagagaaggaaacaatgcacactagggcctgtgggggctgggaggagggagagcatcaggataaatagctaatgcacatggggcttaatacctaggtgatgggttgataggcacagcaaaccactacagcacgcatttacctatgtaacaaacctgcacatcctgtgcatgtgtcctggaacttaaataaaataatttttttaaatgaggccaatgaattaaaaataaatgaatgtggcaggggatgagaggaggtagactgagcaggcacccaaatcatcaagacaggtggaatgttatgatgagttcataaatatggtaacaatagggcttggatgacaaggttcaaagatagaggttgaaggagacagaacaatactctaaattgacaataggggataggaatgtttttgagtctggtaatatcttcaggggcaattaaggtaaagaactggaagttcaacttcagaatggatctaaactgtaggaccctttgctttactatggattaagaaggcaaggtcatcagggagtgactggtagagaagcaaggacacggagcagaaagggagagggctatttggaatcagatagaatcatttgtttccctcatccaccccatcaccctttacaggttactcttctaatccttaaaatagtctacaaagtattatccccattttatcagatgaaaagtatctggctctgaaatttgaatcttgtcatgattgcaaatgccatggtcttttcactgccacatactgactctcagtggtactgaagtgttactgcagcttccagggactaattagaaatcatgtctaatttatgtgaaatggttataaaacacggtgtctttgttttgctcttgaattatacttggctgtaaaattgctatacaagctcgcatatctaatactgtatatttagttcttattttttaagaaaaacattttggactcttaagacattaaggaatttccaaatacataaatatgatcatattgaatttctgcaactgtagtcaaaaacattaagttaatacttatattgcattatttttcaggtgtgaaaatgaaaccaagttcaaaacagaagatatattttgggcttacaatttctgccctactccatactcctggactgcacttctgggccttattttatatcttgtcttctttgcacctggtaaacaaagactttgttatactgttgcattaattgaattgcctctttttggagtagataaactataatttttcaaatttcttacatgctattttactaaagtttttaatgttttatttctcaggaatgggaccaatgccttggactgtgaattctgaaatatatcccctttgggcaagaagtacaggaaatgcatgttcatctggaataaactggattttcaatgtcctggtttcactaacatttttacacacagcagagtatcttacatactatggtaagataatattttttctaacatagttttgtttttatttttatcactatttttagatacactataatatcatttgtgattgagactatgtggttatattttgctgttataagtatctccatgtggctttcttgtcctccaaaggcatcggaaatgtgtctgggaaagaagagagggattctcctatcctaaacagcactgcttcttgttccacagtgcttagggctgtcacccaacccctctcccaactcagacatctcccagctatctccccaggtggaagtctttacaccatagcttttagtttcacagaaacaaacaaaaaaaaaaaacagaaaatggtaaaaagatgtaggcagggagtctagggccaatgagatgtcctgtgacaggcatagcgtccagtccaagagcagaatctgcgtagggctgaaagtagcttcctcaaatgcttaacagtatgctgtgctgtggccataccttccactgtatcacctgtgctgctcaggccagtgcttgtgcatttcagtgtcctctgagaccagtacttaccacttgcaaaagtgtaaacatgacggaagtattcaaatgcaaatgtatggaggccataattcaaaatgaaaaacaatagtgcttagtggctgagtcaggaaaagactttgctttttagaaaaaagatttctgcattgttcacatgactttataggttgcaataggattattcatgatgaagtatgaggtttcattctaatatcctcataagtccatgtggtagagacggaatgcctgctgcttagaccattctcccagaagagcttctctcatctccccgcaatctctttactctgtgctctggccacttatcatttctctttgcaagaacaggtttgtctgcccttagctctctctagtagactataaatccctggagggccaggactgtgccttgttcattgttacattcccagttcctgccaaggcatcctgttcacctgataagcaccaaaaagtgtttgtcaaatgaataaatacatggataaattttgcagatgaatggtgaatatgatgaaacattataaaaatctattccccatctcttctgaccatgctgaactggtatttgcttttagttaatggtatttatctaatgcttttattatcttcataaaactcttctctctcctaatcaccacttaagacatttgaaatatttattttcttggaaaggaaatgcactggcattttaaactggatatatatttagtatattcagctggatcccatttggcaattaaaatttttcgataaattcataaacttatcttcatgacataataaatacgagcacaataaatatttcctcgtatttactgattctagagaacacttaaatatttgaagacctaagtatatgctcgcatcctgagaaagcatttttcatagaaaggcatagaccaaataataaaagtttacatgattatacttttgacagcaaagctcctctttcttgaatttatcctgccagaaaaccagagaaaaatgaggcaacagtaatgaaatttaaatagggcataagcagaattctttcaaaaataaacagttaaaagtgtgttgctttgcattaagcttctctcatgtcagagcactggtccatttggtctactactctctagtagtagaaaaatagttcattcaggctagtttttctccctttttgtgtctcattttaatccacatgttactggtttatgtaagctatgcatttatattcctcatttaataaatatacatcctaatcgtgtattcctctggaaatagttatgtcttctttgttgcctccttttttattgtttcataagatctcaaaatttgattccttcctcaaccatattgcttacacaggtctgccttgtgcccccattcaataatgtttattactaaaaagtatcattgctatatcaccaatatgccattttatatacagcacatgtggctaaagagatcccttggggggcattatgtcaaagcttctctcttgaggtagtcaatttgtgtaattcaattaaatagttgttttaatctggaacttaatgtagggctctaataagatttaaatccttagaagaataaaggtgaggaatatctaactgttcaatagtcctgatggactcgttacagacattttttcttgccattttcactccaagggaggaataaatgagaaactgagatagtgactgatttgaccatgacatggaccaggtcacagcctcccaggtctgcccacactcctccacgacttagccacaggtctaaccattggaacccacactgagtaggcagttttggcatttgcgtgctttggattcctcagattttgtaaaacggtcttgtattttaatagcaattccttgatattattcagctttgggaatccaggtcacaagaaagaatctgtaatcaacttcaggaatcttcctaacccaacaaatgttttttaactataggagtgagtttagcgctgacagatttgatttgttacttctaattatgctactgttcccaaattgtgaaagataatgatgaagataaaatatactattatatttaaaagtcaaactgggtttgctgttacagattttgtagtttagaagcctagtttaatctaaaatgttttaccatctgtacttattttttctttatcttcatcataattactatcccgtctttgtccctccctgctaaagattccatttctcttcctacctccacagtcttgcatatctgtactcagaacacaggacttcatctcctttcattttttttttgtcaaaattcccccattctccaagagctagcttatcagtatcaccctttttgtaaaaacatcccaattaattagtcacactaatcttattctgtatcttaatagcaactcttcctttcctggtcatttagtagaatttaacaatctgggcatcacttttttgagcaactgatattcagaattctaatgggcatgataacatacattatttctattctttacagttgggcaaagctagaattattttccccattacacagatcaagtctctctctcaaccatctcttaactatatctcctatacatgcccctgattttggctgtaagatttacagaatcataaactgccaacacttaagtaggagctgagaagcccccttattttacttaatgaggcaacagaggcccagagaagaggttaaatgactatccagaagtcacatggccaacacttaaactcagttcttcccactcccagtctgatatcctttctccagccaattgtcacattagtttttcatcttacttcccccatctcatacacatgatggtctggactgaaagcctaaaattagacaggggctccattttactttgttgttttccaccatcaaaagtacaagtatagtttcttatattcaaattggcaattcaattatgtgtgtgtgtgtgtgtgtgtttggtagagacaggtttcaccatgttggccaggctggtcggaattcaattattttaaaagtccatcttggaaatgtgtagagaatataaacaagtcatacattcatatatctcatccatctaggcttgctatcatgacccttagaaaaccaaactagctaatatttatgtgtttctggctgttctgcattgacatgcataatcttacagcaaaacaaaattctctgacttcatggagtttacattctagtggagggaaatgaaaaacaaattaagaaaggaacttcttctgacctcaaagtgcctctagtgtaatagacaaggcaagcatacgtgtgtgtacataattataatatttcttggttgttattttaggggtctcaacaacatgctgtgatagcacatggaagagaataattccctctagtcagggaagggaggaaaggcttcaaagccaaacttacatctgagcctgttctattattcttgagtttctaaacttgagtttagaaagatacattacatcatattctcagagttggaacaattggagtaaaccaggttcatagtaattttttggtccatttcatactgtgattatgcatgactgaccagaaaaaaaaagtcaaaatcaagtaatctttccaacttaagcctctctctatatattcatattcatgtatctattatattccgttgcaggagctttcttcctctatgctggatttgctgctgtgggactccttttcatctatggctgtcttcctgagaccaaaggcaaaaaattagaggaaattgaatcactctttgacaacaggctatgtacatgtggcacttcagattctgatgaagggagatatattgaatatattcgggtaaagggaagtaactatcatctttctgacaatgatgcttctgatgtggaataattttcagctgctcatatatttagttatttaaacaaactggggggagaagaacagcaattggtgacttcactgccctgcttctaatctggttctttccacagcctagttttgattgacttcatattctagaatacttgattaggaggaagatacaaccatgatgactttttttttccacaaggaacaatattttaaaaaatatttacagagattttaatctaataattcttaagcaaatgtgtgtaatgccttcctgaaatagtctaaaatgaatattgtacccagtgacttcagtggtatccttttttcctaagaccatttataattattagtggcaacagagtcagtgctaatctagccaaattacatatgtataatatatttataaaggattctgggagatggtccaagggtgttctgtgtcaaaagatggcctattggccctcagttttcctacagagtagtggcttatctctgatcagctgttacaaactaaattccatgtaagctttcatcaacaaattccaaagtgcctcctacaagggcacagctgtccgtatctcctttggattccatatttttgtttctctccaattcagatattgggagttcttcagatactgactctgcacactatcttttgaacattatgaaaatataatctgtcgggttgttttcatacttcttttttttgcatcagtgataaggcatacatttgcgcagatgagctaggaagttttgagaagtaccttttatgttcagaaagtaacagattaaaggtttttatgggttccaaattggttagtcacttaggtatgcaattataaatgcaaaatagtgccagatctttaactgtatatcagggtcagtttttgttcatgcccaaatcactacaccttcctcattggccttggagtcctactatttcgtgccttcatttgtgttacatacatagctgcaagcaaaccatttttcccctttcttttattcaaacaataatttttgaaacaaaaaagaggaaggaaatcagtggcagaaataatcctgctgttattggtgtttgtttaataaaaataatgggacttttttcttaactttttattagctcttcctaagggaaatgtcacatattattatttaattgtacttgtctttttttactttaagagcataaactcgtttttattttgcacacttttctcattttcctgagaatttaccagaaaaaaaaaagatacatagatttgtctctgtgtttttcttattcttggcttagtttttccttcttgtgtaaaaattgagattgcctattggaacagataattggttctaatatagcacgtctataagaaatgcaggcttaattatatttccacaatgtctttccaaggtattcattggtttttatggtaattcatcactgaactcttaatttttgcttttctattaagaactatatagtatgtacaaaattacttgatcacaaaattacttgctagttccaggaaaaatatgaatgaatcttctgtggccagttaggaatacatcagtttgatgcatttttaaatggctctaaacatctaataaggtactgtatttggagagaaaaggtggctatctccatattcaaaatatttcttccagtctccaagatactctattcttttaatgtctggcttgttcctatcacagttatcaagctgagaatacagctgaggaagttcattctctaagtcaccagaggtataatatgtgcttaaactgtcaatttagtgccctaaaaatccattaaccaaaaacaaaaacgttttctccctttggtcatttcatataataaaaaaaattaatattttatagaggttttttccttgaattaggtgctttaacaattgatttccaagggaatattagtattgattttttcctcagaaaagcagatatgatttaatagggaaaattattattctattgatatttcttatctcataagaaatttcttatctaatattttacacaggtaaattgaagtgaaaaataagctactatatggtacaatcaaaatataataaggagaaaaagtagaccaataaagtgctctctaaaaatttattttttggacttaatcaaaataattgcctcaatccttctctttattgtatatgtagccttaactaactatatacttataaactcagctgggctgatgcacagtaactttattaaaggagaaactggactcttgttatttcctaaagcagaacatggcctgttctccctgatataagaaaacaatgttttcaactttataaccataaatgcacataataacagggaaaattagccacagttctcctcccctactcccctgagcccctactttaaaggactatttgttatttatatagtgttaaagataatattccatatctttgaagtataagacagagaggcacagtataagaattatttataactttttagaaacaattacttgaaaaggaaccttatacaattagggtattatttttagatttggtgaacatttatagtatattaaaaattaaatgtttaaattttgcaggtttttttatattaggcaccttttaagttcccagcatatttggctaccactatcaacttggaaacattccatttgtagtatcatcaaatatatattttgtaggacaatttatatatgatgtgatttgacctaccatattaaagcagacacagattacgtatcatgctttcaaccaaaattacagacttcctttgaaacatgctgcagatttgatagaggtatattatgtcttaggaaaatacaatgaagaaggtccaaatccctattgaggctggatgtctgatctgcactagacttaagaggatatatcatttcatctgcatataaacacatagggctgaatgtgatgtcaaaagggtttgccgttaataattttcttcaatgtaaacattcctaataattttgattgttgctccttagtcaatcatttcccaaaacatgattatttttaatatatgtaaaatatttaaataataaataataaaaggtaatgtgtccattttaaattttgttcccagccatacacagtagttccctgatacaaaatgctatgagaataccgactattttttcataatttaattttaccactgaacctgattttagtacataagagtctaaatattaagttattcactctaaaaggggaaatcagtaaaagcaaggaatttatgaaatttttgctgtaatttcagtatctgttatacaggggaagaatgatcaggaaaaatataagctgacaacttacccttttgctttttaacaacaaaataatattgaaaatatattagaataactcacagatccagaagttggtggaaatggaagaatgttttagaaaataccatccatatgtttatctaagaaagtctcagaatttagtgacactaatacagttcataaatactgtaatacagtggagagagttggaatgttattttggttttatttcatcagcacaattattaaaaacaacaaaattaatgagacgttttgttataatcagatttttttttaccatattgcaagttataaaatgtcaacttatactaagtacctaacaactgacttttattcacttgttgtgacaagtttttaattaccaaattaagaccttttcagtatctatgagtaaaagaaatagatgattatatcagaccaggagcagagaatttataatatgtgctttatagcaaaatgtattaaattgtggttaaaatttatagctcatatgtagctgctgccaataagaaggctcagaattgttctgtggattaatttttacatcctgttttctgtcacttttaccaatcttcttggcctcatgtacaataatgtaaagccaatttgatgaaatggttcaggttgtagcagtctataaattgtcggtacattcagctcttctaggtgagcaatactgctgctatttttctagaaatagcaatcatttaaaaatgccaaatagctaactgctaccaactctttcttgtatcttgtctctttagagaaggaaatttttgtgtgccagtaatcatcaaagaggtgttttataagagtgttgatgttcagaagttcatgaaagtattttatccgtataatttgctagtgagctaaaacaatataatttatgtaaatctttatatgtacaaaatatatagtctgttgtacttgagtaatttggtctatggaattttaaatgccttcatttagcagtaatattcacatttttattttagacagttaagttcatgtgtttgattttgtcatgtcagcataaatgagaaaaagaagtggatcatgcagctaatgagtaaccaacattttgtaaagttttaaagttttagcaaacaacattattccatctcatttaaaggttaaaaaagaagagacaactctagccaaagtagaaatttatattctacacgtccaaactgtctcctagcagcttttggactatatatcacttgatgttaaagtatcttttatttgtaataaatattcaaatttctatttagaagctctaatgtatacctagattaaatcaaatcacagttttatgcttttaaaatatatgtatttcaaactgtatattttaatttctgagtgcatgttatatagtatttaatacttcagatgtcttggcaaattcaatataagtatttattcccacaagcgatatatgggatatctcttaaaaattatgaatatgtaccatttccttcaaagtcatcctagcctatgctgtatcaaaagtattgtatattttatggagatttagtgatatacatgtaaatgttttttaagttattttattgaagttcaatctttacataaaattaaaatctttttttaaaaaaagtgtcagtgccagaactgtaaatgaaaataatcaaataaaagttaaaataattcattactca

SEQ ID NO: 14045 - DNA, 7221 bp, Homo sapiens
gcccgctccgcagcgccagctcggcaggcgcggggcgtgagtgtggagtgagacccgccgggctccaactccgcagcgtcggagcgcggcgggcagcaactttctccccggagcggccgtggcggcggctgctgccgtggcagccggagcggaagccgggaggaagaaagcggcggcagcggcggttgctcccgccggctcgggctgtctagctcgccgagactgccggcccgcggagccgcgtccccccgggcagccccgggcccctgccctatgtcccgcaaggcaagcgagaatgtggagtacacgctgcggagcctgagcagcctgatgggcgagcggcgcaggaagcagccggagccggacgcggcgagcgcggccggggagtgcagcctcctggctgccgccgaatcgagcaccagcctgcagagcgcgggcgcgggcggcggcggcgtcggggacctggagcgcgcggcgcggcggcagttccagcaggacgagacccccgccttcgtgtacgtggtggccgtcttctccgcgctgggcggcttcctgtttggctatgacaccggggtggtgtcaggggccatgctgctgctcaagcggcagctcagtctggacgcgctgtggcaggagctgctggtgtccagcacggtgggggcggctgccgtctcggcgctggccggaggcgccctcaacggcgtcttcggccgccgcgctgccatcctcctggccagtgccctcttcaccgccggctccgcggtgctggctgcggccaacaacaaggagacactgctcgccggccgcctggtcgtgggactcggcatcggcattgcttctatgacagtgccagtgtacattgcggaggtctcaccacccaatttaagaggccgattagtcaccattaataccctcttcatcacaggagggcagttctttgcaagtgttgttgatggagccttcagttatctccagaaggatggatggaggtacatgttgggacttgcagcagttccggcggttatacagttttttggctttctctttttgcctgaaagccctcgatggcttattcagaaaggacagactcagaaggcccgtagaattttatctcagatgcgtggtaaccagaccattgatgaggaatatgatagcatcaaaaacaacattgaagaggaggaaaaagaggttggctcagctggacctgtgatctgcagaatgctgagttatcccccaactcgccgagctttaattgtgggttgtggcctacaaatgttccagcagctctcaggcattaacaccatcatgtactacagtgcaaccattctgcagatgtctggtgttgaagatgatagacttgcaatatggctggcttcagttacagccttcacaaatttcattttcacacttgtgggagtctggcttgttgagaaggtgggccgcagaaagcttacctttggtagtttagcaggtaccaccgtagcactcattattcttgccttgggatttgtgctatcagcccaagtttccccacgcatcacttttaagccaatagctccgtcaggtcagaacgccacttgcacaagatacagttactgtaatgaatgtatgttggatccagactgcggtttctgctacaagatgaacaaatcaactgtcattgactcctcctgtgttccagttaataaagcatctacaaatgaggcagcctggggcaggtgtgaaaatgaaaccaagttcaaaacagaagatatattttgggcttacaatttctgccctactccatactcctggactgcacttctgggccttattttatatcttgtcttctttgcacctggaatgggaccaatgccttggactgtgaattctgaaatatatcccctttgggcaagaagtacaggaaatgcatgttcatctggaataaactggattttcaatgtcctggtttcactaacatttttacacacagcagagtatcttacatactatggagctttcttcctctatgctggatttgctgctgtgggactccttttcatctatggctgtcttcctgagaccaaaggcaaaaaattagaggaaattgaatcactctttgacaacaggctatgtacatgtggcacttcagattctgatgaagggagatatattgaatatattcgggtaaagggaagtaactatcatctttctgacaatgatgcttctgatgtggaataattttcagctgctcatatatttagttatttaaacaaactggggggagaagaacagcaattggtgacttcactgccctgcttctaatctggttctttccacagcctagttttgattgacttcatattctagaatacttgattaggaggaagatacaaccatgatgactttttttttccacaaggaacaatattttaaaaaatatttacagagattttaatctaataattcttaagcaaatgtgtgtaatgccttcctgaaatagtctaaaatgaatattgtacccagtgacttcagtggtatccttttttcctaagaccatttataattattagtggcaacagagtcagtgctaatctagccaaattacatatgtataatatatttataaaggattctgggagatggtccaagggtgttctgtgtcaaaagatggcctattggccctcagttttcctacagagtagtggcttatctctgatcagctgttacaaactaaattccatgtaagctttcatcaacaaattccaaagtgcctcctacaagggcacagctgtccgtatctcctttggattccatatttttgtttctctccaattcagatattgggagttcttcagatactgactctgcacactatcttttgaacattatgaaaatataatctgtcgggttgttttcatacttcttttttttgcatcagtgataaggcatacatttgcgcagatgagctaggaagttttgagaagtaccttttatgttcagaaagtaacagattaaaggtttttatgggttccaaattggttagtcacttaggtatgcaattataaatgcaaaatagtgccagatctttaactgtatatcagggtcagtttttgttcatgcccaaatcactacaccttcctcattggccttggagtcctactatttcgtgccttcatttgtgttacatacatagctgcaagcaaaccatttttcccctttcttttattcaaacaataatttttgaaacaaaaaagaggaaggaaatcagtggcagaaataatcctgctgttattggtgtttgtttaataaaaataatgggacttttttcttaactttttattagctcttcctaagggaaatgtcacatattattatttaattgtacttgtctttttttactttaagagcataaactcgtttttattttgcacacttttctcattttcctgagaatttaccagaaaaaaaaaagatacatagatttgtctctgtgtttttcttattcttggcttagtttttccttcttgtgtaaaaattgagattgcctattggaacagataattggttctaatatagcacgtctataagaaatgcaggcttaattatatttccacaatgtctttccaaggtattcattggtttttatggtaattcatcactgaactcttaatttttgcttttctattaagaactatatagtatgtacaaaattacttgatcacaaaattacttgctagttccaggaaaaatatgaatgaatcttctgtggccagttaggaatacatcagtttgatgcatttttaaatggctctaaacatctaataaggtactgtatttggagagaaaaggtggctatctccatattcaaaatatttcttccagtctccaagatactctattcttttaatgtctggcttgttcctatcacagttatcaagctgagaatacagctgaggaagttcattctctaagtcaccagaggtataatatgtgcttaaactgtcaatttagtgccctaaaaatccattaaccaaaaacaaaaacgttttctccctttggtcatttcatataataaaaaaaattaatattttatagaggttttttccttgaattaggtgctttaacaattgatttccaagggaatattagtattgattttttcctcagaaaagcagatatgatttaatagggaaaattattattctattgatatttcttatctcataagaaatttcttatctaatattttacacaggtaaattgaagtgaaaaataagctactatatggtacaatcaaaatataataaggagaaaaagtagaccaataaagtgctctctaaaaatttattttttggacttaatcaaaataattgcctcaatccttctctttattgtatatgtagccttaactaactatatacttataaactcagctgggctgatgcacagtaactttattaaaggagaaactggactcttgttatttcctaaagcagaacatggcctgttctccctgatataagaaaacaatgttttcaactttataaccataaatgcacataataacagggaaaattagccacagttctcctcccctactcccctgagcccctactttaaaggactatttgttatttatatagtgttaaagataatattccatatctttgaagtataagacagagaggcacagtataagaattatttataactttttagaaacaattacttgaaaaggaaccttatacaattagggtattatttttagatttggtgaacatttatagtatattaaaaattaaatgtttaaattttgcaggtttttttatattaggcaccttttaagttcccagcatatttggctaccactatcaacttggaaacattccatttgtagtatcatcaaatatatattttgtaggacaatttatatatgatgtgatttgacctaccatattaaagcagacacagattacgtatcatgctttcaaccaaaattacagacttcctttgaaacatgctgcagatttgatagaggtatattatgtcttaggaaaatacaatgaagaaggtccaaatccctattgaggctggatgtctgatctgcactagacttaagaggatatatcatttcatctgcatataaacacatagggctgaatgtgatgtcaaaagggtttgccgttaataattttcttcaatgtaaacattcctaataattttgattgttgctccttagtcaatcatttcccaaaacatgattatttttaatatatgtaaaatatttaaataataaataataaaaggtaatgtgtccattttaaattttgttcccagccatacacagtagttccctgatacaaaatgctatgagaataccgactattttttcataatttaattttaccactgaacctgattttagtacataagagtctaaatattaagttattcactctaaaaggggaaatcagtaaaagcaaggaatttatgaaatttttgctgtaatttcagtatctgttatacaggggaagaatgatcaggaaaaatataagctgacaacttacccttttgctttttaacaacaaaataatattgaaaatatattagaataactcacagatccagaagttggtggaaatggaagaatgttttagaaaataccatccatatgtttatctaagaaagtctcagaatttagtgacactaatacagttcataaatactgtaatacagtggagagagttggaatgttattttggttttatttcatcagcacaattattaaaaacaacaaaattaatgagacgttttgttataatcagatttttttttaccatattgcaagttataaaatgtcaacttatactaagtacctaacaactgacttttattcacttgttgtgacaagtttttaattaccaaattaagaccttttcagtatctatgagtaaaagaaatagatgattatatcagaccaggagcagagaatttataatatgtgctttatagcaaaatgtattaaattgtggttaaaatttatagctcatatgtagctgctgccaataagaaggctcagaattgttctgtggattaatttttacatcctgttttctgtcacttttaccaatcttcttggcctcatgtacaataatgtaaagccaatttgatgaaatggttcaggttgtagcagtctataaattgtcggtacattcagctcttctaggtgagcaatactgctgctatttttctagaaatagcaatcatttaaaaatgccaaatagctaactgctaccaactctttcttgtatcttgtctctttagagaaggaaatttttgtgtgccagtaatcatcaaagaggtgttttataagagtgttgatgttcagaagttcatgaaagtattttatccgtataatttgctagtgagctaaaacaatataatttatgtaaatctttatatgtacaaaatatatagtctgttgtacttgagtaatttggtctatggaattttaaatgccttcatttagcagtaatattcacatttttattttagacagttaagttcatgtgtttgattttgtcatgtcagcataaatgagaaaaagaagtggatcatgcagctaatgagtaaccaacattttgtaaagttttaaagttttagcaaacaacattattccatctcatttaaaggttaaaaaagaagagacaactctagccaaagtagaaatttatattctacacgtccaaactgtctcctagcagcttttggactatatatcacttgatgttaaagtatcttttatttgtaataaatattcaaatttctatttagaagctctaatgtatacctagattaaatcaaatcacagttttatgcttttaaaatatatgtatttcaaactgtatattttaatttctgagtgcatgttatatagtatttaatacttcagatgtcttggcaaattcaatataagtatttattcccacaagcgatatatgggatatctcttaaaaattatgaatatgtaccatttccttcaaagtcatcctagcctatgctgtatcaaaagtattgtatattttatggagatttagtgatatacatgtaaatgttttttaagttattttattgaagttcaatctttacataaaattaaaatctttttttaaaaaaagtgtcagtgccagaactgtaaatgaaaataatcaaataaaagttaaaataattcattactca

SEQ ID NO: 14046 - DNA, 156600 bp, Homo sapiens
cgcctcccgcccgctccgcagcgccagctcggcaggcgcggggcgtgagtgtggagtgagacccgccgggctccaactccgcagcgtcggagcgcggcgggcagcaactttctccccggagcggccgtggcggcggctgctgccgtggcagccggagcggaagccgggaggaagaaagcggcggcagcggcggttgctcccgccggctcgggctgtctagctcgccgagactgccggcccgcggagccgcgtccccccgggcagccccgggcccctgccctatgtcccgcaaggcaagcgagaatgtggagtacacgctgcggagcctgagcagcctgatgggcgagcggcgcaggaagcagccggagccggacgcggcgagcgcggccggggagtgcagcctcctggctgccgccgaatcgagcaccagcctgcagagcgcgggcgcgggcggcggcggcgtcggggacctggagcgcgcggcgcggcggcagttccagcaggacgagacccccgccttcgtgtacgtggtggccgtcttctccgcgctgggcggcttcctgtttggctatgacaccggggtggtgtcaggggccatgctgctgctcaagcggcagctcagtctggacgcgctgtggcaggagctgctggtgtccagcacggtgggggcggctgccgtctcggcgctggccggaggcgccctcaacggcgtcttcggccgccgcgctgccatcctcctggccagtgccctcttcaccgccggctccgcggtgctggctgcggccaacaacaaggagacactgctcgccggccgcctggtcgtgggactcggcatcggtgagttcgggctccgtgaagggcgcccgggatcccattgtcaccgcccttgaccctgggtgttgcgtgcctcttgcccatcggggtccccgtctggtctcccagggtcagagaatcctccacttctctggcctccagagcccatctgtttgttggtccagcctccaaggctctcccgggaggtgggagggtcgggggggagggggtgtcactctagtctccctcgagcgcacgtggaatctttgataggccacggaccagtcagtccaagtggttgttgcctctcagcacttccagaaacctagctgagcaccagctctttccttgatccagcctaacctgatgctgcttcttgagcttacgagggtctctgctttcctgcactgtcccaccttgcctctccactgctagcccctttcgttttctggggctcccagcctggaacctagaccatcgtcaagttacagtgagataatatttagagttaagtaattctggactctgaaaggtttattagcgacccctgccctctttgcttatctagcatttgtctttagatggcatctccttttgcttttatgctttttctattgcctttcagctttcattcttttcccaagtaaattccattctcctctgtttttccaactttttcatttgaatccttttttatccattctcctctttgtttttcctctcctgctttccagttgggaaccaaattatctattaaaggtcatattcacttccttaattcatttaggagctactccccctgtggataaatgccccgcaagataaatgtttggaatttacttcaaaaatgaaggcattaaggttctcctggcgttgaatttttttcaccctggttgctgagcaggggaggtacaattggcaagtttttggcagagggaagctatttggaatgtgctctgtattattagaaagcacttttgagggaaagtggggggctgtgacttaaatctcactagtaatttttctaagacacaccgctgatgcttttttaatgtttcgtttcataattcagttttttgtttcccttagggtgctgttgaagtatttcttccctatggctggggcttgatgaaagcgctttaaacctggggctgctgctgatctgtgtattcaccacttgtttgatgtttgtgcttttcaccctttctctgtgggttctgaagggaagcaaaggccatatattcaactccacatgcgggaaccatgagcctaaaacccagctcactgcactttatattcaaagtttgtcagtagtgaccttccttttgctgtttattgtactgttaattagcaaaggtagggcaaagctctccgtaacatattaagttggcacaaaaatatccaaagtgaccaaaaaatccagctgaaatgaaacctatttgtgtggaaactacttgggccttcaggacccttcaacaaataacctgctgtttaagtgaccacgattcttttctcagcattgtctgcttgggacatctggaccttttttgttgcttctgacatagaaataacatcattttaggtagcaagaattgttctgtcaacctcaatcttttctgtaattttgaaattgaatcatgctttgcagagctgtctaaatgaagcttcctagtgttttgctatggcaggtattggttaaaatcttgggtattatgtttactctttttatctgacctgcgaattgagccctgttctgtgtaaggtccccttccagatgttgtgagctgaatagtgaggagaatgtattatactttagtaaatgtagcaagctggggcaaaagcaacgtagaacttgctaagctttataagataggttatcagagatggctgatgaattcagagggggtacagttatctccaacagagggaagccagaagctcttaccaatggaaatggtatgttgacatgtcagtattttaacagaaacgaggaaaggacgttctaagcaaggggcaaaatgggtaaaggaaggaaagcatagggcatacttggggaataggtggaagcagcaatagaggacaaagcaggagatcagattggaagtgttggtgtgcaagagctgtggaggcctctctgtcttgcagcctcattctgtggtctctgggctggttggttcaatagagaagcccagtttagatatgttctccattcagttctggtgtggcccatctcacttccagaaacatacctctcagaatagaagccctgaggcagtttcgtaaaagccctcttcatttacaaaatgaagaatgttttaagatcataaacaggctttgaaataggccgcattcaaaacaaaacagtaatgaaataaatccacttcaaattaggattaaaattaggatctatgcaaagcatgtaattatacacataaaatcattaaaacttacaaagaaaatcacttttttttaagctacaaggaaatgggttcctaacatgagcattttttgagggacattaaatcagtttgcttgtttggtacacaatctgggttaattttatgccattgttttttaagtagttaaattttatgtgtagtcagggatttgttgttttgtccttatgatatttaggaaatgttgatgaataacaaaatgtggcttttgatacctttttcagacaagtttgctctaagaacttctttcctccacacgtttacctgtggtaaaatatacggcccatgtgggtcaaggatttctgctcattttgttcactgatatattcctgccacataggagatacttgttgaataaatgaatggtgagcaaaaacgaaaaaaaaaaatccaaattccattgctggtcgggtagcactttaaggtaggattgttcttttcaaaccacaaaaatagtgcattatcaaaatatttgaaagggcatctaaaggttttggttgtaatagtttaatgaaatcattatctattcaacacttgctaattaagcttccattatggatcctgtcagatatggggcaggcagtaattagataaaaatcccaccctggaggtgttcattttataatggagtagaaagatacataaacaagcaattaaaagagacatttctctgtagtgccagatgacacacagaagagtaagtggtcagttgattctttcagggaaaaaaatagaacacaggattgaggaaagttctacagtgggatattcaaagtagggtttgaagagtgagtaggtgttcagcagatgatgtagatgtagccagaaaagtgcttatttagtgctttagtatgttcgagacctggtggagtactttacacatattacctcatttaatcttcctgagtctgaggaatgggtctccttttgttgggtgtggaaacagttaaatggcaaggtcactgattacagagacaggattaaaaaaaaaaaacaaacaaccttgagtcttttgctctgttaccctactgggcatttaaggtggagttaatagctggtgtaaaggcacagaaaaatcaaattagtatttgaagcatagatgagtgagggtggtgatgaggtggtcatgagactggaatgttttggggggattaggctgaatatggtttatttggagagcttttagaggtttttaacagtaaataatgtaatcagatttaacatctcttgaatctgagatgtgagggtttttgttttcccattatacttttaagctcttttaccttctttcttaagtcttctcatgtctttgaaattttgggtattagcaatcatttgctgagatggctactacaggatgggtaaagcatagcatgtgaccgtgaattactgatatggaaggagtcagtggacccttcagtagaaacctttgacaaaggcgaagatagcaaggagtagagtgtagttattaatgggtattaaatgaattgtatagtaaaagaccttaagtatcagaagtcagggatatgtgtatttgttttgatttaagggttctgttttcttgactggttgtaaaaaaaatactgcgtgcctgttttaaatatggcattattttgggttttcttttcttttttttttattggttcaccagagtcatctttggttcctctagtttatttttctcttccacttgagtcctgacactagactttctccattgtcgctgcctgctaccatgaccatctgaactttttaaacgtgaaaagtcgaatttcaaataggacatacgttttccatcccagaaatgattgtattctaacagggttaatctttttttttttttttttttttgtctgagatggaacttcactcttgtcgcccaggctggagcacggtggcgagatctcggctcactgcaacccccacctcccaggttcaagcgattctcctgcctcagcctcctgagtagctgggattacaggcgcctgcccaccacacccagctaatttttgtatttttggtagagacagggtttcaccatgttggccaagctggtctcgaactcctgatctcaggtgatctgcctgcttcggccttccaaagtgctgggattacaggtgtgagccaccatgcccggcccagggttaatcttattttgtatgttctttacacacaatcccattttcaggtgtttgtttagcagtattgtacctataatcaaggttttgaagtgtggttagttacaacaggattgaagaatatgagtttgctcatttgctttatttattttctatcattgtgtatctcccatgcataacacaaaagaaattgtctagaaaacacaaagtacaagagcatagtactgttaacactattagcatgtacacagtcagtgaaaaagcatacccattagccctttctccctggtgttggcatttattctactgcttattataagtggtgatttagggcctgtgtagggaatatcaagaaatctctaaatttgatagtcaccagtattcaaaacctttcctgagaattgacatactaatttatacagcacgggattcgttgaattaatcttagatttacatcagtttctcctgtgtcagcctctttccggactccctctacttgaacacaatttgtagctgtaaattgcagcttgtaattagtatattatggcctgttgagtaatacttttaaaaataccacattttttttcaaacagcactttgaattcttcctcagtgcaaatgaaatgtaaaatcttgtttgatcaaaaaaatgcaatgttgagatcaatgtcaacaaagaatgtcatttaaggtaagcatagttgggcagaagctcctaattttcaaatagttaatcagctaaaatacagttttggggggaggtgctcaaattttttttttttccactactccccactttctttctttttggttgtttttgaaggcaggaattctgtattggatttatgcttcctactggtgtgaaactgacacataaagcctcctttgacttcttgtatttccttgttttatacacattaacagctttgttccctccccttttctgtctggcagcctagggactgacactgcagttatagtgaggattatgatctagttgtgtttgcctagtagtatagcaacaccctcttcaagtgagttgtcagtaagataacgtaagtctgttaacgtgagttatgtgaaattgttcacgtgacttccttggaaaacattgtgctttttcattcatccattttgccctcttatggattataaacttaaagtaagaacacactcaaagttaactgacttcacactaacatctttttgaacacctttaatgatgtagaaactgctaagagaactgaaatagcaagcagtcgttgccatctttacccaaaatcacctgagtctaattttctttttctcatattgtacttggctcctttgtacatctttcttgtctacacctttttccatttctttacctttctttttcctgtgacccatcagagtaataaatagtagcaacacttcttatagcacctatttctaatagtatcaaaacttccattgtcaggaggaaaattcatactcaccagaaaaacctcaaacttttcccacatgtaaaatttaatttctctggttgtagaaagagagaaaaaagttttacgggtacttctaaactcaagttgagagtactacatgctttctagttaggccttttattaaaggccaccatttgaaatggtgcggtctgcagcatgtgtccaaggccacgtggcaggagcatcgtttcacagcagggccaagcaccgtgacagctggtcaccagcgagcaatggcaccagtgttcttctgattttagcgccaccctgccgctgcactgggaggagtctaggcagtccatcctcttggcagggtgtggattggccatcagcttagcggccaacaccctggacgtagtacttaagacttgttgaatgcttaacttctaaacattttgcacatggctaattcacatagtcttcataataacccagggggataatacggttacctttattttaagataaggatatttaggcagaaagagttgaagtaactttctcatgatcacaaagctactgggtggggccagagttcaaacccaagaggtctggcttcccagcctgtgctcaaccagtctgtgacactcactcactcactcactcctccctgaaactagcataattgttctttaccatgatatgtcatgtggacattacttttgtttgttttagtatagatttatttttttattgtggtaaagaacacataacatttatactcttaacccattttaaggtgtacagttcagtattgttaggtatattcacattgttgcacaacacatctctagaacattttcatcttgcaaaactgaaacactgtgtctattaaacacaaattccccagcctctcttccctatcccttggcaacccacctttctaccttctgtttctatgatttttactgctttggatacttcacgtaagtggaatcatgcagtatttgtcctttgttggcttacttcacttgaggttcatcatggtgtagcatatgatagagtttccctctttttaaaggctgcataatattccattgtgtatatgtgtgtgtatatatatacacacctatatatacacacacatataaaaataaatacacatatatgcatatatacatatatatacacatatatacatatatacacatatatacatatatacatacatatacacatatatagggcatttaatctatccattcgtctgttgatggacctttgagttgcctctccctcttggctgttgtggataatgctgcaatgaagatgggagtgcatacatctctttgaggtccttctttgaattattttggatatatacccagaattgagattgctggaccatgtagtagttctatttctaattttttgaggaacttctatcccattttccatagtggctgcattttacattgctaccagcagtatacagggttccaatttctcaatattcccaccaatatttgttgttttcttttcttttgacagtggccatcctaatggatatgaagtgatatggtggtttggatttacatttctcttatgattagtgatgtggaacattttttcataggcttgttggccacttgtacatttgtatatcttctttggaaaattgtttattgcattttcacgtccctgacctatttttaattggtttattgcagttgctattgagttgtagaagttccttatgtattctgaatattaaccccctatcagatatatgatttgcaaatgttttctttcattccattggttgctttttcactgtttattgtgtcttttgatgtacagtttttaagtttgatgtagtcctatttgtttttgctaaacacacacaaaactaaaactgttggagtcatttgtcatgccccttgagagtaagctttttggaagttctaataaaatactagattttacttctaggagtatgtcattttgttccctagaatacattctttgtgaaaatatattatcttcatttcctttgatataatgctttttagcagcttaacagaggcattataaaaagtaggctctaaaacaaagctcattctttatgcctataggtgtatatgtttgcattcacctcagtaagtaggaacattggtattttccttagtttaagtatgaattaaaggaagtgtagagaaattagggaaattagcactgttagtaacagtgctgagatttaaatctgatcaagaaccagtgtgcaccccacctttctattatatgataaatccagtttttgattgtgaaagcgaaatatggtcactataatgtttcgtaaattagtattagtatttaatgtgctagcaatgaaaatcccaagatgatactttctagaatttcacaaaatgattgtaatcagattgagggaacagtagtaagacagtagttatagacagaagaaattaatgcaaagaaataatatatatataatgtatagggtatactgtatatattattaaaaccagtataggatgaatggaacagaatcagaattccagtgatagatccaactgtttggaagagtttagtattgagcaaataagagggaaaagaacgaagtaactgagaagaggaaataggaatatgaatttaaaataatgtaaatgaaatttaggtctcatcttctctagtatattggtttaagagtctctaattttttttgttttttttcttatctatattgatgacatcttttattataatttttaaaacctcaaagcagagattttaaaagcaaggcaacagattggaaaaatattatggtaaatttatttacttaaaagaaaatatatttatcctcaaattatactgaatagactgtatacaacaagaaaaatacagttagtaaatagactcttgggaaagtgttaaaccttgttactaattacaggtgaaaattaaaagaacacgatacttactaaattagcaaattaaaaactcagggctggccgggtgcggtggctcatgcctgtaatcccagcactttgggaggctgaggcgggtggattatgaggtcaggagatcgagaccatcctggctaacatggtgaaaccccatctctactaaaaagtacaaaaaaaaaaaaaaattagccaggcgtggtggcgggctactcaggaggctgaggcaggagaatggcatgaacttgggaggtggagcttgcagtgagctgagatcgtgccactgcactccagcctgggcgacagagcgagactccgtctcaagaaaaaaacaaacaaacagaaaaaccccaaaaaactaagcaaaactcaggctaagttgttccctaggaaaatatgattttctgcttgtaaaataaattgcaataattttctatagagaatattctagataaaaagctgacatgtttaacatgcttcattcatttttcttcattcaacaagtttattttgaattactaatatgtattatatactgtgctcttgcagttcatttgtaaagttgctaataattctttgatctggaaatttcacttgagggattgtaatataaggaaataaagaaaaactcattttgtttaaaagtatttatagatatgcaatatgtaattttaaaaagctaggaggaacctccaagtgcctagtaattgggaaatgattagttagaccacatcacattgacattaaacacaaaaatgtgtagaccttagatacacatatcctgcaaatattaagcccaaagaatagaacctacttgtatggacctattgattgcaactacctaaaaaattacagctggacatagagtttggaagaaggaataaaggtgtatgtttagtttacatatagcacagggccttttttacattttgtttttttactcttccctttagatcattattttacttcacgcagatttttgttttaaaaggcacagacacacacataacaaaacactgtggcaagatacttttttccaaattagattttacttcttattctatggaaggacatttttaggaaataatgacaaaaatgttgcaatctaatcgtataatagtggtgtgggtgtattttttcccccagatttttaactcattgcatgaattagcaaggggtcatgatacatgaagtacatttctgggatcttactattgtatgtatctcaggaaagtgtcttgcttactttatggctgagaatgagagcttctatgggctcccattccacactccctcctctcttttgggtttcctcagctgttcctgcctgggccttgcacagatgcgtcttcttcctgtttctatagatgaactggctaaggcctctccctgtctcctattcaaagctgtcattccagctctttctcttttgtctcataaaatttcttcttctactgggttattcccataagcatggacacatgctgtaatttttgcagtcttaaaaatttctgtttctgccccactttatctttcagttactatcctatttgtctcctttattttacataaaacagttgcctatattccttctctgtagttcctctcttccctttttttctgaaccctatccagacaggctctcatccttaccactccactggcattgctcttgtcaactttactgtgccctctgtgttggtcagtgcaaggactgtcttcagtcctacttgtcctaccaaaggcatttgacacaagtaaatcatgtctttatgggccattttctttggcttttggacaccatattctcccagctttttctgtaggctgctctttcccccatctcctttgcagattcctcttcatctcccagacctcttaatttgggccagcctcagagctctcctcttctctacatttactcctttggggatctcatcttgtctcatggcttggaataccttctgtgttgcagagaactcccaaatctagatttcagcccagacctgtctcctgatctccagatgcttgcacccgacttccctgttttgtccaccatctcctgcttagcaggtcagagcattcctcctggggcttgcaccaaaagccttggagttgtccttgactacctcatgtgccccttatccagtcggctaggaaatcctttgaatctaggccctaattataactgaaatctgtttcttatcacttccactacaatcaccctgatcccaaatgccacccatctctcacttggagtatttcaagagtctgctacgtgttcaccctgcctttttcttgacccctctgctttctttttatacacatgagagccagaatgattcatttaaaatataaatcagactatgccacttctctgcccaaagcccctgattagctccccacctcagagtaaaagctagtggtctgcagcaccccatgggatctttccccatccccacttcttctttgacttgatttcctactgcttttccttccctccttttccagctgaccccgcctctaggaacacaatagacatccttccaggcctttttatgggcggtttcctctgctgggaagcctctgtccagattcctggagcactctttccctttctctcttgtgtttcctcaagcatctcttcttagcggggtcttccttgatcattcggcttaaagttgcagctcccaccaccagttttccctgctttatttttctctatagcagtttccactagccaaaacacttaatggttgtgttacttactgattgttttctctccactagagtgtaatctccatgaaggcagattttaatttttctgttttgtttattgctgttccaccattgaatagtgtagtgcctggtacacagcaggcatctagtaaatatttaatctatagataacaactaaaacagtataatcctaaggaataattttgagctgagattggatcaaggatgttgtaggaaatttgtgtagtggatggaagtaattaaatgttctctagggttgcttctgacactactctatggtttcaaactttttaaagtggttgggagaaaataggtattatttttaacttcaattaatactttgaagtctaacattgttttcagtacctgcaatgaaatgagtctctccatgtatctagggaacctaaacaaacaaaagttgatttgtgtctgaaaaatgatctgacagactctcaaggatgaacttggagtaattacacttagatgtgacagtggaatcaacagaaatgcaaacttattacgtgggatatatctattccacatgttaataatgctctaatgtctcctctctttcctggcagacagatttgtgggaagagggattactgattcacagacttgcatcttcgtgtttgaacctggaattaaagcaggagtggaaaggcattggagtcgtagttcacccagactgtaaagaggcttgatcagttttctctgaccttcacatcttctgtctgatgactcaagttttcaaactttagtgagtctttctcctggagaatggagatacggaagttgaaatctcctcttattctcttcttagcagccaatccacgtttcagattctataatacatttcactaggtagctattgagcatctgtattgggccaggcacattgtggcttgggattcaaaaaataagacacattttatttttcattatggtctgattataaatttaggggacaaaaaacatgtgtaagtgtataatgatgtgataaatttctaaagatggtattacatatgtggaatttaaaaaataagtaccataatcttgaggttgatctgatccttttaaatcatccagatttaattctggatggggttacgtttcaagtgaagccaatctgcaactcttcatagcaaatggagtggcactctcaccagtccaaattgtgataattaaaacactggtcttaatattgcattttaagcttatatttgaatatgagtgcttcaaataaatgtggaaagttacattgtccaacaaaataattaaattatgctgtgaagacttggcttgagccacatttcctggtttactgttctagtttttaatcttaccccataaaccctctatacttgtgaaaccattcttgccaccccagacagaccttattatacctctctctatgacacctctattactgcccatagtgatactcatatgtcattaatacagacagtaatagaaaaatatgtaagacacagtcgtgcagaggaaggttgatgaggtctacctggagctggcaagtcaggtttcacaaaaacctaattcatagagttattgtatggattaattgataaactattttctgttaaaagttaaacgtaattcctgctgcttattagcacatgctcagaaaacattagccattattgtagtaattaatgtgaatttttcttcccattttatctctgttggagacagacatcaacatattttggattggtgaacaaaaccagactgtcctgaattaagttttcctggcacatgtgtaattaaaacctctgtaggactgtaatttgcatattaggtagtatgagtacaaatgagttagttacctcatttcacctttatagtttctggttaaggagagaaagacattttgaaattttcgtagttcataatttgaaccttgaaatttaggattgtacaaaaagaaagggaatttaatgcatcaaatatatgacatgccattattctttgttgccagtagttggccaatttcaactttaattgaagtacaggcttttataatagtttgcaaaaacacagcaaaaaagtctagcaataagcttttaattttagatttcctccttatcctgtagaataaagttttaacaatagtgtcaacataagtaaattataaagaatctaatgacattcaagtgaatgaggatactctatttttgacctactgtacaaattacagtgcataaagtggaattcaaggatcttattttacacaacataaagttcagccatgtgccacataatgacatttcagtggaggatgactgcgtataggatggtggtcccataagattataatactgcatttttactgtaccttttctatgtttagccatgtttatacaaaaataccattgtgttacagttgcctacagtatttagtacaataacatgctgtacaggtttgtagcctaggagcagtaggctatagcatatagcttaggtatgtagtgggccgtaccatttaggtttgtgtaaggacactctatgaagtttgcaaaatgtattcctgagaatgtgtcgctgtggctaagcaatgcatgattgtatctgcatgtgcacatctttaccaagaatatcttactaaagattctgaggcagtgagttttttacttcttcatagataatataaaatagacaaatctaaaggactttatttattatgaatgaatagttcttgaggctggggaggtaagaaccctgtttaaaaaaaggtttataacctgattaaggaaatcatgaatgttgcaaaagaaacacatgactttgttacatttgtttggtaattatgcagttatttattcatctgtgcaagagatcattagagtctggattattttcaaaattttagtttctaaatatgacatgcattttcaaataaacatgaatatatattaagaatacagaattatagttattaataagcattaaaactttgcctatggatagctgctgctatggttaatagttaccttttatttgctttaagtgaacatctggctacttaatctaactcaaaatgatttatagacataaactcaaagccactgtcagtaaatttttctttatttttaagcagtcatgaagataagatacgcagagataagccatatgagcaaatagtgccttaattgttaaaaagggaatgaattctaggaattaagatgaataaacatgactagtttctagcaaaattataaaatattattaatgaagatttggaagcatttagaaaagagtctgatgattactaggaacttttgtgtgttcactagaaatatgccttattaaactaatctcttttgtttttcctttgaaaccatttcttggtgagtagattaggaaaattctgcatataaagcatttggcatactcctctttcattgaatatatttgaagaacattttctttgtgttaataaacaaaataagtgagcaaaataaactttaatctctgaaatttggccaataaaaaaaaagaagcaaacatggtttagtaggatgccttgtcagtgttgaaaagtgggcccagaaggtctctactggggtgcaatcaagcgctcagtccttcagctctgtgcttgtcaaatccagggagcccagagcaagctaaatggctgttatgcttgataacagagctaatattaaaaataactttaagatactggaatgctgttaaaaactaagaaaagttaaaattcataggaaatgtatttataatatgtatatctccatatattttacattttaaatatatttgcattattgccgttaatccactcttagagctgaccaacagtgagacagactccttacagagaacactaggagagagtttacaaagtctatacagggaggcggtcagtgtaaggtgcagggtgacctttgttgaggagatgaagaagtcttccttgtattcagagcctgactgaagggcttctctagtcccgcttgattctaaaattctcaagcttctttattgattacaattgagaaatggtttcatcaaagctgccagagaatttgtcccctgaaatggaataaatcatctgagatcctcaagattgcaaattactaaagaggaagacagtgtctctttttttgtaacttctatgagagttcagtagatgttggttggctcactgacaacacctgagttattctatttgattacttttggcttctgacttttacattatcaaattcacttttcttggatatattttaggtcttttgttatgaaatcaagaacattatgttctttttacagagagagtttataaagtacggagatgaccactctgaaagccatatgcccctagcaccctctgaagcacctcagtcctctcctgactctttcagtgattcattctgccatttgcatgattcctctgaagaaaaccaattatttagtgttcttgaggtgattgacttgcaaataatcttgtgctcttaaagcacatttttggtaaattttcaaatttctgaatactagaaattatttctttagttataattgagtgagatcagatattcacagactaatagactctcaaaaccagtgggtgctgccttcataccacacattttaccatgctaggataaacattcatcttcaatttttttgttgttaaaaaacatacttcaccaaggaatttattatcccactcattttatcacatacctcttctggagcttagggtctcagccccttcctgtctcttcttttgtgtctcccctgctacacccctaccacactttggtgtttttgaggtttcttaatcttaagtaaagtgtgaataaaaagcatttttagaaagtcttaccatgtttattgatctgtaacatgcaatatacatactgtgcttgctgtattaacacagctccaagacaagacccctagcttttctacagctagactaactcccccaaatcccacttctgtagagctttggagctgcagcagctgttgaggtaatggttactttcctcaaaaggtagccattatgatgactggcttcaaaaagtaaaaaaaaggtcttttgaaaaattgacagttctccccacaaagagttgagtgactggtcagctacaatttcttctaacttgtaattccttctaatatatgatgttgaggttttagagagagcagttaaaataaagtggtctaattagacagtgtttgcatcatctttttcagtttagatgttgaggaagtgttcagatcctaccaagcaattttttcttcttttgagtgagaactgtctatacttttgtacttagtgtctttacctgtcccccttttgagctttatgtcttaaagaaatgttatgccatttactccttttaatagattaaacttattttcaggttattgaagaaaacctgtctcacagaatcataagacaaactgtatgaaactcttggaacagtgcctggcacatggtagtatacagtaaatgttatctgctgtttcattttagttttaacatatctaccatgcacctgcctcaatggaatagtgtaaaaggatatttatacttacaatcagtataaattatagttatttgtacttataatcagtataaattatagttatttgtacttataattagtacaaattatttaatttatactagtgagttttatgaatttgtacaaattaaccccttctgagccctaggtttctcagctttatccacttcatggtggtttaatgagtattaagtagtagtacagaaggttaactggtacatgtaacctcctggtagtgttggcttactctggtctcttatgaggtaagagttccttaaggacagggaccatgtttttgtgtttatcccaggatctatcatagcctctggcacatagtagatatttatttagtaaatgcttgtgggttacataaatgggagcattgggaaggagaatgaacagaagaatgtgtagaaatttttctattgtaggtaacactcttccaggagaaaaaggttatttgaaagccacaggggtcttaaaaactcagttttttcatttaaagcttaaagcgttttgatatttacttctaaagtattacaactaatatgaccatgactgatgaatggaagaaacacagaggggtatagactggaagagaaaggagagagggagagaaagactaagagatttagtgagtactatgaaaatgttaaactctaaagttacactcttgaaagtagcttcaagagtcttagctcaattatcaggggcctttggaaagccaaataggtgattacctttattttaaaaattacttgcttttaagactttgaaggatcctttctgaatggaagatacagccaaaggtggtagtgagaggtatggaagattgaggaggatgtgtgtggttgtgtcttcagtaaccagagcaaacggcctgagattagaggaaatcaatctgaggactgggtacattttgtccactttcactgtcagagctaccaagcaattgggaggtaaggttgtagagttggttttgatgtcctgtctcaagacctaattatgcctcttgggattaggtgaggaaaatatgtgtcctgggactggccgttggtaactgcattagagaaaatgagcttgacaggtctcccacaatttggagatttctccagaaacatactgcagtattaggtccagggaacaatcctgatctgcccttggtttagaggcaacacataatcgcactacctatcagtttagtcctgacgcctatgaatgcccagttcttccttgtcattcagcttgtggataggagacaacaatgcatgtcttgtttcttctcgtatttgtaactgatttgcttttaagactgtcttgtctgaattgccttctgctgttggtgtaataagaaaaagcatgtggtgtatttaaccaatgggggaaaatatttcttatatatagagatgaaatagacatgtagctagagaataggcgagaatagacatgtagcttgtttgatggcccatgtcatttctcagatttactgctgtgtttttcttaacagctggttacaaaaacaagtggcactaaaggaaaagaccatattttcttttatcatggccacaggtgtttatttttatttatttttatgagtatataaaatgaaaagtattcagattaaccggttattcagagaggtgatatcaggtggggagtagtgggattaaaaaaaaataccctcccatgccacctgcattctgattgccaatgcatccgtgattggtgccttgctcagcatctcccaggtgccatcacttcagaagtttcccagattttgctctttcttagaaggcagcagggagggccaggcacgatggctcacacctgtaatcccagcactttgggaggccgaggccggtggatcacgaggtcaggagttcaagaccagcctgactaatatggtgaaaccctgtcgctactaaaaatacaaaaattagctgggcatggtggcatgtgcctttaatcccagctacttggtggaggttgcagtgagctgggattgtgccactgcactctaggctgggtgacagagcgagactctgtctcaaaaaaaaaaagaagatgggagtagcagaaggaatgcgggacgtgaaattggaaatcctgggtcctgctttcaaatcttttatgtaaatatgtgattttagataagtcacttaatgcttgagcttgctttctcttctgtaaagtacaagttatatgtaaagttccttctaacatagccatttcattggccagataagaaagaaaaaggagtactgtcatgatctgccacctacttaggccccttctgcaatgtgaaatggacactgtgagtataaaaacatactcaaaagtatattttttaattctctcactcaacagtcaacacaaaagacttctgtgaccaaatgtgggggatttctccccactaacaagcaatcagttttgcagcagacaccagctggatgtcctctaattcagttctcacactgtcaccctagaaatagcgtctgattccacaggttgagggcacagtcctcaagacctgccaccacccccaatgccaacagccttcagacaccggttgcaaatttgggtctctggaactttgaccaaccaactacttcaagttggagtttttacaacaccttttttgggttatattaattttctagggtggttcacagaaatcagaaaacagtttggtttactggtttatttcaaaggatacaaacagataaagagatacatagggcaagacttggaagggtcctgagcacaggagattttgtccctgtggaggtggagtcctccactgttggtacatggatgagtttttgttcccttcctgtcaacctccatatgttcatctgtcgagaagtgctctgaactcagcccttttcaccttttaaagaagtgtcataatcaattatatcattacctaggcataattgattaaaccattggcgactggttaccaacttaaccttcagcttctctccccttgtaggttgggggtcccaaccatctaatcctgccttggtttttccagtgaccaacccttatcctgaagctgcctaggggctaccagtcatctgtcaacttactagcatacaaaaagacatcactttgcagagtctaaggattttaggagttgtatgccatgaaacaagggtggaagacctaataaatatttcacactatcacagacagcaagtggagcatcaggccttaagaggagtcctcaatcctagtctcatacatttacaaaatgctaaatacataacatgaattcatttaaaaaaaaatgaagctgtaagcccagtgctgccttatagtataattttttacatttaccctaaaaacattttaactttcaatagaatgctccattggatttggtgctcagtcctggacaactcttcatttccagtgacctgacttaggttgaattttgttatttgagccagccccgtgagtaagcttggcttgctggctatttgtgtgtttcttgttatttaagacatcttgctgaagttgaagagtgcagtctttgaaagagtgctttttaatggaaaactgttgcattaaaaagtggctttgtgtttttatagaccacacaattctaagccaaatgacacagtttcaaaatagctattgatggatagaacacacaggtaagtacttgagagcctggtggcagaagttggaagtatttgtaagaagaaagcacagcatgagccagatctagagtttcctgtttgatcattttttacaatatcttagtatagatttgcagttaccctgccagatgtgtacttcatcttttattagacacattcaaatatatcagttaaagagcttttggttcagtatctgatattcggagcatttattctaatattgccttttactgcctcccaaatctatacttgtattggtactgtgtacagtaaaggtgaatgcattttaaagtataatgaatgatacctggtgttgatcgaaatggggtaagtcttccacagcctgtctctccactgattacaaccaagaactctggaaataatgcaaaatgcagctgaggattctgaaaagtaaacaacagcaggaagattgggtagggaagtcaaaatttgaagacctactggactggcagtgaatttactgtttgtatcatcttttctttcttaatctcctggcttttacctttggaggggtgagtcccaggactgctcattgaacaccaatggcagaaaagcccaacagaaaccccctccttctagtcagaagattcagaatagggacccttgtgagccagaagatatgggaggagttccccatcctttttttcctttttctccttgccctgccttgaggccagcccagttaaaaacctgcagtgctgcagtggtgatggcagtagtatagcactatggatgctgagatacagccctctttctgtacaaaggaaatagaaaagggatccctggggtctagagagtgtgggagggaatcagttattttttctctgtagtttcccttgctggtatgctgcaaggacagtcccaattatgtggaactgaaaaacagtgtaagggattaagttctaagagaaaatcctggttttatgcatagcagatttggaaaagaggaccctaggggccagaggggtcagggaagtggtggagaagagagctgaaaaaggggatcttctgtttctgtgtataagctgaaacaagtcctgagctcacccctaagcagcacatgcacaattcagacccaaaggggcacagcaaatgttttgagtacagaactgtgacataaggtactacacagtcccagtctatctcctgagtaatctgaataacatagctattgaaaattgctatttaacaagatggctgactagatgcagacaggaagaacttctcccactgagaaaccagaccatcaggaagaactgcatactccaaacagatcttcagaaagaaggtattgagagtagacagaagaaggatacagaccccgggctgaagtgggggaggaaaccctgcatggagttgctgagcaccaggacttattcctgaccctgagcagctcctggggaatgggcgagtgaaataggcttggagtggcccactctcgttacagacctctagtatcttcactgcaggagaccccataacccctatggatatttgagctggcagagacagaactccagcttgcatggatccccaggggtctggcgtgggaatggctgcagtggagcatagtcatgggtgctcatccttcaaggcccactgtactcctctaggtggctttagcctttttggctgccagacctggacagagcatatcttgctcatgggaaggggcctgtctgatctgagtgtccccctatttgctggcctatcccagggtccctgcctggccacacctgcttgcagcatggccttggttgcccagctgaggcacttgccggcagctactgccatagctcttttgttagaatatccatcctcacagagagcttctgtaggagttgtaactgattacaactcaaaactctggaaataatgcaaaatgcaactgaggattctgaaaagtaagcaacagcaggcagattgggtagggaagtcaaaatttgaagaccaacaggtatggctgaatttactgtttgtatcatctttcttaacctcctggcttttaactttgtagggttgagtcacaggattgctcagtgaacactatgtgtacatgccgtgtgcatgctaacctcactaccacactgtcactggtgcacacatgtgcagggacccctgctgccttgccgaagcccttttgctggcagactgcattggagtgttaccagcagactgggaacacctcagccccttcagcacagcaggagcttaacctcaaggggccagagaaaaaaggctgtgggcctggtcccaggtccccagggttagagcacacagcctaggaatgctaagctgagccttggccccctgcaatcatccagacatgaagccaatcaatttatacccagcttataccactgtcaaaccctcaagggcatcaaagaatataaaaagcaaaaagccctatatgaaggacagcaactttaaagattaaagaaacatcatctcacacagatgagaaagaaccagtgcaaaactctggcaattcaaaaagccagagagtgtcatcttacctccaaatgaccacatgagctcgacagcaaggattcttgattgaaatcactgaaattatggcatagaatacagaatttgcatggcaaataaggtcgtccagatttaggagaaagttgaaactgaatccagggaatctaaggattccaataaaatgatacaggaactgaaagatgaaatagccattttaagaaagaaactgttcttctagaggtgaaaatctacaagaatttcataatacagtcagaagtattaaagcagaatagaccaatctgaggaaagaatctcagagcttgaagaccagttctttgaatcaactcagttggacaaaataaaaaaaataaaaatgaacaaaacctctgggaaataagggattatgtgaagagaccaaacctacaactcatttacattcgagaaagacagagagagcaagcaacttggaaaacgtttttgtggatattgtccaggaaaatttccccaacctcactagaaaggtcaacatgcaaatttggtaaattcacagaacctcagcaatatactacaagatgtccatcttgaagatagatagtcatcagattctccaaagtcaatgtgaaagaaaaaatattaaaggcagatcaaagagtaggggcaggtcatatacaaagagaatctcattaggctaacagcagacctttcagcagaaatcttacaagccagaagagattggggggcttatattcagcagccttaaagaaaagaaatttcaaccaagaattccatttccagccaaactaaacttcataaacaaaggagaaataaaattttcttcagacaagcaaacactaagggaattcattaccaccacacttgctttacaagagatgcttaagcaagtgctaaaaatggaaatgaaatactattatctgccactataaaaacacttaagtacctagcccactgacactatagagcaattatataatcaagtctgcataacaacctactaacaacatgttgacaggatcaaatcttaacatcaatattaaccttgaacattttaaacaaggccaggtgttgtggcttatgcctgtaatcccaaccctttgggagactgaggcaggtggatcacctgaggtcaggagttcgagaccagctgggccagcatgatgaaaccccgtctctaccaaaaatacaaaaaaatagccaggcatagtggcacatgcctgtaatcccagctactcaggaggctaaggcaggagaattgcttgaacctgggaggcagaggttgcagtgagctgagatggcaccactgcactccagtctgggtgacagagcaaggccccctctcaaaaacaaaacaaaaccttgaacataaacaggataaatgcccactttgaaggcagagtgtgacgagttgcataaagaagaagacccaactgtatgctaccttcaggagaccatctgaaatgcaaacccactcataggctcaaagtaaagggatggagaaagatctatcaagcaaacagagcaagagttgctattcttatttagaaaaaaatagactttaagccatcaatggtcaaaaaggacaaagaacccaggtgcggtggctcacaccggtaatcccagcactttgggaggccaaggtgggcagatcacctgaggtcagaagttcaagaccagcctggccaacatggtgaaaccctgtctctactaagaatgcaaaaaattagcgaggtgtggtggtgtacagctgtaccagctacttgggaggctgaggcatggtaatcacttgaacctgggagatggaggttgtagtgagctgagattgtgccactgcactccagctgggtggcacagagtgagactccatctcaaaaaaataaaaaggacaaagaaggacattacataatgataaatggttcaactaaataaacagtcttaactatcttaagtatatttgcacccaacactggtgtgcttagatcaataaaacaagtttgtaagagacctatgaagagacttagataaccacacaataataatgggagacttcaacatgtcactgacagtgttagatcatcgaggcaggaaagaaacagatactagggacctaaacttgacacttaaccacatggatctaaaagacatctatacaatatgccacccaacaacaacagaatgtacattcttctcacctgcacatggcacatactctaacattgaccacacatttggccataaagcaattctcaacaaaaacaaacacaaaaccctaccaaccagtctttcagacctcagtgcaataaaaatagaaatcaataccaagaagatcccccaaactgtacaattacttggaaattaacctgtccctgaatgacttttgtgtagagtgaaattaaggtacaaatcaataagttatttgaaattaatggaaacagatacaactcacctgaatctttgggatgcagctaaagcagtggtaagaggaaagtttatagtgctaaatgcttacatcaagttagagctcagattaacaacccagcatcacacctagaggaactagaaatacaagagggagccaaccctaaagctagcaaaagaaaataacaaaaatctgagctgaactgaacaaaaaccacaggtgaaaattcatataaaagattgatgaaaccaaaagttggttcttcgaaagaatgcataagattgagagactgttagctagaccaataaagaaaaaagatcctaataaacacagagatgacaaagatgacattaccaccaaccccacagaaatgcagaaaacagaaccctcagaaactattacgaatacctctatgcacaccaactagaaaacctagagaaaatagataaattcctggaaatgtaaaacctctcaagattgaactaggaagaaatggaatacttgaacagatcaataatgagttctgaaattgaatcagtaataaaaaacctaccaaccagtaaaagccctggaccagagggatttacagctgaattttatcagatgtataaagaaaagctggtatcaatcctattggaacttctagaaaatattgagtaagagggactcctctctgactcattatgaggccagatcattctaataccaaaatatggcagacacaataaaagatgaaaacttcaggctaatatccctgatgaacacagacacaaaaatccttaacaaaacactagcaaattgaatccagcagcacatcgaaaagctaatccaccacaatcaaataggccttattcctgggatgcaaggttgattcaacatatggaaatctatgtgatttatcacataaaactgaaaaccacatgatgatctcaatagacacagacaaggctttcaatgaaattcaacattccttcgtgtaaaaaaaccctcaacaaagtaggcattgaaggaacaaacctcaaaataataagagccatttatgacagacccacagccaacattataacgaatgggtaaaacctggaatcattttccttgagaaccagaacaagacaaggatgcccaatctcaccactcctattcagcatagtactggatgtcctagccagagcaatcatgcaagagaaaagtaaaagtcatccaaataggaagagaggaagtcaaaccatatctatctacagatgatataattgtatatctagaaaaccccatactctctctccagaggcttctagaattgataaacaacttcagcaaagttttaggatacaaaatcaatgtacaagtatcagtagcatttctatacatcaataacgttgaagccgagagccaaatcaagaatgcaatcccattcacaaaagccacaaaaataataaaatatctaggaatacagctatacagggaagtgaaatatctgtgcaatgagaattaccacacactgctaaaggaagttgaagagaacacaaacaaatggaaaaacattccatgttcatggataggaaaagttaatattgtttaaatggccatatgtccaactcagtttacagattcaatgctatttctacccaactacctatatcatttttcacagaattagaaaaaactattctaaaattcatatgcaaccaaaaaagagaatgcatagccaaaaccatcctaagctaaaagaacaaaagccagaggcatcatcctaccaacttcaaactatattacatggctacagtaaccaaaacagcatgatactggtacaaagacagacatatagaggagtggaacaggttagagaacccagaaataaagctgcacactgacaaccatctgatctttgacaaagtcgacaataacaagcaatggggaaaggattacctatttaataaatggtgtttgaagagctggttagccatatacaaaagtttgcagctggaccctttcctttcttcatatacaaaaatcaactcaagatagaacaaagacttaaacataaaacctaaaactgtaaaaagtctagaaggaagcctaggaaataccattctagatataggccatggcaaagattccatgatgaagactccaaaagcaattgcaacaaaaataaaaattgagaaataggatctagttaaactaaagagcttctacatagcaaaataaactagtgtgagtaaacagacaaccttcaaaatgggagaaagtatttgcaaactatgcatccaacaaaggtctaatatccagattctgtaaggaacttaaatcaacaagcaaaaatcaaacagccccagtaaaaaatgggcaaaggacatgaacacttttcaaaagaagacacacacagccaacaagaatatgaaaaaatgctcaacatcattaatcattaaagaaatgcagatcaaaaccatgatgagatagcatctcataccagtcagaatggcagttattgaaaagtcaaaaacaaaaagcatacgaaaaacatgctggagaggctgtggagaaaaggaaacacatacagtgctggtggtggtaatgtaaattagttcaaccaccgtggaaagcattgtggtgatttctcaatgtaaaacagaactaccattcgatccagcagtccccttactgggtatatacccaaagaaatataattcgttctatcataaagacacatgcaaacatatgttcatcacagcactgttcacacagcaaagacatggaatcaacctagatgttcatcaatggtggactggataaagaaaatgtacatatacaccatggaatactacacactataaaaaaaatcagatcatgtcctttccagcaacatggatgctgctagtaacattatccaatgtgaattaatgcaagaacagaaaatcagatacttcatgttctcacttataagtaagagctaaacactgagtactcatggatgcaaagaggaacagtagaccctgactgggcttatttgagggtggaggttgggaggagggtgaggatcaaaaaactacctatcaggtactatgctctctacctgggagatgaaataatttgtacaccaaactccagtgatgtgcagtttacccatgtaacaaacctgcacttttaagaaaacatttttagcaggacccaatgaaaacataatatccaacatgttcagaatataatgcaaaggcacttaacatagagaatcagggaaatctgacaagttgctaagggaaaagataacaggtgctcactacaagatgacccagatggtggatttatcacacaaaaactttaaattggctttggtaactgtgatccaagagataaaagtgaaaacacttgcaatgaatggaaagatagaagttctcaacagaaaaacacgtactttaataaaggactcaaatggaaaatggattgatttaatggcagagagagatgaaaaaagtgagtgaacttaagacagataaatataagtaattcaaacaatagaaattacctaaaataagagggaaaatggaaaaaaaatgaaccaactcttaaggacttgtaggacaatatttggatttctaacatttgtgtcagcataatgccagaagaggaaaaacaaatatctgaagaaaaaatatttaaagatacaaggcctgaaaactctccaaacttggtgaaagacataaacttacagattcaagaaactcagcaaacttcaaatggtattatttcaaagaaagccatgcccagataatattataatcaaattgctgctaatgaaattgttgggcatatcaggagcttgtagtcaccagtctgctctaacaggtaaaaaatgggacaaattgaaaaatcagcagttcttcctggacctaaagagaagtgaggtcataggacaaaccactacccccaaaactggagaggcaggtggatacagctaaccataatttacttgagtgataaccaattaacaaagtcttccatgggaaacattgcttgtataggaaaacctgcattatagttgacaaattgctagagattcactgtggacaaatcttagattttaaaaactccaggaggacctagtaagcagaagtgggtggaggggtcttccactcttatgaatttcacctcttgctgctctaccaggttttcacagtgaatatttgagaaaatttccctttgcttctggcacaaggaagggaaaaggagccattttgaagtatgccagagtactctgttttgttttgtttttaaatgaggtctgcttcagaaaaaattagttaaaacacagtgtaagtggcctggggtaagcaaagcacccaattctagttctctctagccttttatttgagaaaaggggaatattaaactcctctaccctctagccattctgttccaactaagagagaagagaactgagaagcacttgtgaagttcccagtccagaggcacagcctcactaaagcttgagacctaatcataacactgtagagtgtttctccttctcctacaccttaccactttattactgacaatgtatttatatccgttaaccagtgtgtcatgtctggctatcaagaaaaaaatgagaagatacagtaaaagggggaaaaatgggctgaaggaagagacagagcaaacatcagaatcaaactcagatatgtcaggggttctggaatcatcagattgggaactgaaaacaactatgaataataagctaagggctctaatggataaaatagcttgcaaggacagatgggtaatgtaagcagagagatgataattctaagaatctgtaaaagaaatgctagagatcaaaaacactatgccagaaatgaagaatatggggctgggtgcagcagttcatccctgtaatcccaatgctatgggaggctgaggcaggagaatcacttgagactgggagtttgagaccatcctgggcaacatactaagactgcatctctacaaaaagttttaaaaatagctggacataggtggtgcatgcctgtagttccatctacttgggaggctgaggtgggaggatcccttgagctcaggatttggagtctgctgtgagctgtgatcacacccatgtcctctagcctgggtgacagagcaagactccgactcaaaaaaaaaaaaaaaaatgtctttgatgggctttaatagactggacatggctgaagaaagaatgtccaagcttgaggatgtttttaaaagaatcctccaaaactgaaaagcaaagtgaaaaaatactggagtaaacaaaccataacggaatatcagaaccatggggacaactacaaaaggtgtaacatacatataaaagaaatatcaggaagagagaaaggaaaagaagaaatatttgaagcaataatgactgagcatttcccagccaaaccacagatcctacaatttcctagttgacaaagcagaataaatggcagaatagctatgtgaaggcatgtcatttttaaactacagaaaaatcaaaggtaaaaatcctgaaataagccagatcataataaataatattatatattatctatataatagcaaagataagaatacctttttctcaggaacagtgctagcaagaagagagtggagtgaaatatttaaagtgttgagagaatgaagccctaccagtctaggattttgtaccctgttaaatttttccttcaaaagacaaggataaatagaaaattgcttaaacaaaggaaatttgttgccagtagacttgccatgcaagaaatgtaaaaaatgatatgtcagaaactcagatctacgtaagaaaacattggagagaaataaatgaaggtaaaataaaactttcattttttaattaatcattgatctgagacaacactttattgaaaatagtagcaataatgcctttgattatgtgtgcttgtctatatatatacttgtctatacttaagcacatatatacatggtttgtttatggttcatttccccccagtattttttctccttgcttttcagttttggaggtttctgttacatacatatatcctcaagctcagagactctttctggtgtgtacatgtgcttgtatgtgcatgtgtgtgtgtatatgtttatgcttatttatatgtgaaatgcatgacagaaattatacaagggatggatggaaggaattagcattattttgctattataaggtattcatactactcatgaaatgatctagtggcacttgaaggtggacctgaattagttgtaaatgtatattgcaaactctagggccagcacaaagaaaaagtaatgaaagcagtataaccaatgtggtgagaaaggagtgaagataaaatcacgtaaaatgctcaactaaatccacacaaggcagaaaaagggtgaatgacaaaaataagaacaaataaatgaaaacaataaatatggtagactttgatctaattgtcagtaatcacttcgaaggtcagtggtctaaatgtaccaattaaaaggcagattgcaggagtgcctataaaaacaagacccaactttattgctgtctatatgaaactctttaaatataaatacacatggattaaaagcatgggaaagatatgccatgctaacattaatcaaaagaaaataggattagctatattaatttcaaacagcagatttcagagcaagtaaagttatcagggataaagacacatgagttctataatggtaaaagtgttagttctccaatttaccttatgtgcctaataacagagtgaccaaattctcaatgcaaatactggtagaactgtgaggaaaaaatagatgaatcactattatagttggagacttcattacccttctatcagaaatggccagatttagcaggcagaaaatcagtacagacattgttgaactcaacaacaccattactcaactggatataactgacatctgtagactacttcatccaacaacagaatacacattcttccctagctcagatagaacatagaacgtagaacacattctgaactgtgaaaccttaacaatttaaaaagaatacaatcatataataactgtccttaggctacaatggaattaaacaaaatcaacagcagaaggatagctggataattccaaaatgcttgcaggttaaacaacacacttctaaataacatgagtcaaaaaatctgaataaaaatagcaaaaaatttagagctaaatgaaagtgaaaaatgaaaatttgtgggattcactgaaagcagtgcttttaaatttatagtatttgatgtatttagtaacagaaggagaaagtgctagagtcagtcttctaggctttgaccttaggagacaggaaaagagggaattaaatccaaggtaggcagaagataagaaatagtaaatattggagtggaaatgaaattggaaacaggaaattgatagaggaaatctacaaaacaaaaaactggttatttgaaaaggtaaagtaagcagagctttagtcaggctaagaaaaaaagagaccacataaattgcgaatatcagatatgaaagaggtgacagcactacagattccatggacattaaaaatgacaaaggaatactatgaataactctatccctacaagtttgataacctagatgaaatggaccaattccctgaaagatacaatatatcataaccttccaaaactgaaagcaccaggttcagatgggtttacaagtgaattctagcaaagatttaagagagaaactgtaccaattgtttagaatttcctttagaaggtagaggcagagggaatgctttctaactcattttatgaagccagtattaataccaaagccagaaaatacaagaaaactatagaccagtatctctcagatacatagatgtagaaatcatcaataaaatattataaaattgaattcaacactaaagacatataccattatgaattgggatttgtcccaagtatgcaagactgattcagctttttaaaattgatattatcacatcaacagactaaataatcacatcatatcaatagaatttcgagaccagcctgggtaacagagcagtaccctctttaaaaaatagtaaaataagaagaataactaaaaagtgacagtaatcaagacagtgtggtgaaagaatagacacgcgtagatcagtgagacagagagcccaaaaatggactttttaagatgcttagcagcatttctggcctgtattcactaagtgccagtagcaaaacttctgctggtttagcaaatgtgtccagtaggtgacagttgtccctaggtaagagggttcagagggccatatctgagaaccactgccctaatccccaccttgaagtccctgcatataaccggttgggtcttctgttcctttatataaatatgggctgatatttgtcctgcttatattccgaaggtggccctaagcttcaaatgagataatgacttggaagtgctttgacaaaaacgccaaacagagtttattattttatgtggttaggaataagaaaatgctgcaataaaaaatttttaaaggatgtccagaggtgaagggaagtaactaggatggtcacaacagaagaaaaagcattttgaatagagattgagaagattgatatttaagggaagatgtaaaatggctgttcaaaaaggatcttgttggatggcattactttggcatcacccaaatccaggttctggccttctatttttctgttctgtaaagttgattttttccttttcagttcttattgagttgattggggatagagctgattatttccattaacccaacctaaaatagacttgagaaaggaccagaatgctttttgtaaaataaggagaagtaccaagcgaagtgaagtgccctgtttagctggtcagtgttttggggttttttgttctgtctcttcttacagaagaaggatctgacacctttatggaaagttgtttggtgaacttgtaatcagaacaaagcagttatttgcattcctaggacagtgtagttggtgactgataaatgttcatgttcttttggtttctttccagtgtatagagaaatctaccaaatcaagcagaacttttcactggtttgtcagggcactctttaccctgtctctgccagaaacacttcaacaagtctctgagttttttttttttttcctgccatagattttatacagactaattggccttctaataatactctttgtcaaactaataataaatgacaaattaggttatatcatattccgtttatgcctttctgagggaatatacttattgcattcacttatgataactttggtgtttggaaacctccattcaggaatttgtttataaactacctcttaaggaaaggaaccatggtgatagtaatgtttttgtaacaatgacaaatagctctcttaaactgattgtatataagaaataatgagcagcaaaaagttaggggtgcacagtattgacatgaaaactgttgattaaacccagaatttaagaagtcatagcaagtaagtaatgtggaactgatgccttgtctgataaaaaaggttacatgcctaataattagattttaaaacatgagatatttgttagatgaataataataataataaaagctattgaaggaaaccgcttcctgtagaaactaggcacccttctgtccttttttttttcaaccatggtcctaattaattcatatattctgcatttccatggtaacaagatagcatctgtagatgctggtaatttagcagttgctaatgaattataataacaggtactattacagaaatgtcagctattatactggagaccatagttcaggagacttttcttttttctctgacttaatttcttttatatttcttgacatatttaagatgcacatagttttcacccaatttttttttattgagtggatgcaaaagagagataaatttgttactaaataccactaaaaggattgtttggaaacatttaatgaataagtataatgtataattgcattcattaagctatacatgttttttgaatgtattatttctgggaatgaataccagaaagagtgaataccagaaagactttgagattttagatacattgtatttttatctcctttttatttctctttttctttcctcactccttcatttcaacagacactaaatacctaatctttccaaaattatactagattctccttatacattatttttataactatagtatgaagtatataattatccattagctaagcacaaatgagatgcataaatgtatgcaagactgtcttcctctgcccattttatgtctagacattcctagacatggctgttcaccagtggccacatttcttacaagaagacactgtggtcagctcttgatggttcaggcactgtctagctctttctttgtgacttgtttttgggccatattcctgctgtttttacctctcatcagtgagtggatgagaaaaaaaaaacaagagatctcatattaagttaattagtttgatatttatcagctgtgtctatgattttttttttttgtagagtatgttatttttaaatttatgggaaaatttataattctgagggttaaattttctgtgaaacaaaatatttgtgcaccatgataagaatgaacaatttgcttttctcattccctggccatcttggcggctgttcttggttgggggccatctggcacctaagccaggaatatgatggtggcaaaaatgatggaaaagtcactggagttgatcaacgctaggctccaacttgttatgaaaagtggaaagtatgtcctggggtacaagcagattctgaagatgattagataagaaaaagcaaaattggtcatcctcactaacaagtgcccagctttgaggaaatccccaatagagtactacaccatgttggcctaaactggtgttcatcactacagtggtaataatactggactgggcacagcatgtggaaaatactacagactgtgcacactggctatcattgatccaggttattctgatgtctttagaagcatgccagaagatactggtgaaaagtaaaccaagcaaaataatttttctttagtaaaacttgccagaggtttatccttgtaatccctaatcccagcactttgggatgctgaggtgggaggatcacttgaggccagtagttggagaccaccctgggcaacatagtgagaccctgtctctataaaaataaaacgaaaaataaatagctgggcatggtagtggttccccgttgcccaagctactcaggaggctgaggcaggagtatgtcttgagtctaggaaatcgaggctgcagtgagtcaagattgcatcagtgtgcaccagcctcggtgacagagtgagaccctttcttcaacaagaaaaaaagaataagcaattttcaccggaagcaatctgtctatgggattaaacagtgaagaagaaagaagagaaaaagtaaatagaaaaattggattttatgctgaatattctttgactaatataaagtttggggagagagaagaaacgtgcagttgtatgtgctttaatatttctgcagtcctgaatagatgtgtaataaattagtaatttctgcagtccagaatagatgtgtagaagtaatactaattagtattagtagaatgatgaagacaaaaatgagtagaaagctatatgtttagggagacagcagaatgatattagaaattaacactaattgcatagaattagcatgtctgtataaataaaatggtttaaaaggatttggaaacaatattaaccatgtttattatgtttaaataatatactcattttattactaaagagtaaagttctttcaaataaacatggttcttagatacaaaatatattatcaacaacagcaacaaagtgagaccccatttctaccaaaataaaaaattaaaaaattagccaggcgtggtggcacgtgactgtagccctatctactcaggaggctgaggtgggaggatcacttgagcccaggggttcaaggctgcagtgacctgtgattgcaccactgtactccagcctgagcacagcgaaggaccctattgcttaaaaataaataaataagaatttatatagtaaactagcacttatgctttcctcatgcatcctgtacattagctaactgaatcctaaagcctcttggtatcaccctcgatttgcagttttgtacaccgggaaccaggtaagtcattttcccatggttacatatgaagtgtaagtggcagacctgcaactcgaatattgttcgttattgaaattcaaacatgttctgtctatatgccacataacatatatgatttactttgaatttatttaaattagtttccctaagaattgtaaaactaagtccttaagatttttaaatctcataatttgagaaaaaaagctttttgtcaactttgagatttagcttttgatagttatgtggctctgttatcttttcatgaagacttaattttcctttcattgacttacttcattttaacttgcaagcttagttcatgaaactgcctgacaaacccaaagcaatcttccgcctcttatgaatgaactcatgagtctttcttatccataggagtacacttaccacattatgcatcatcataattatgtgtttttattaactgtacttttttgtctccagctacatcactcagttccttgtattttacattttatatgtaggcatggcattttattctggttatgtgtgaaacattttcggaataagtgatggattattattgcttatttatatcttaattctacctctagaacatagtgggacatcttttcctagtgaatatttattaggcagagtctgaaggagctgatagtctttaatgctttatcgctttctttaaaagtgcatgttatttctctgaccagacattgatgtactactcaattttcctttaggatagtgacgttttagataagtagaactagcaagaatatgtgtgggtttgttttatagctagctttggggccatttactgaatgttatactcagtacagtttgttctttcactcattgcattatacatcatgagatgcaggcctgaagctttctggttgacctctttgcctggagagagtggtaggttccagggactcaaagttaaatttataaatatttaatctcaaacctctacatttagttacttcgattaggatgctctgtttaatatgtgtgtgtttcttaagttgctttgaatgtgtaagttttctaaagctttttgaaaagtgtgccaagtataaatacttttagagggactgtttagccacataaacatgaatattaggattagacagtcttgccatttactggctgtgtgaccttggatgttttgtcacacttgtgatgttatagctggttgtaaaatggggctaacaataactatttcaacgtgcttttgtgagactttgaaataaaacacttatgtaaaacctgcctcatggtaggtatttaagaaattattgtttagctcctgactcaccttatctccattgtggttatgttttgtaataaagtatcacaatagaatatttgtatcctctgaaaataattggccctttgggtcacttcaggttgtggtagagaagttataaggtgtccaagccatatagaacatttgtagagtcttagatgacagctaataatttttgtttgtttgtttgtttgagacagtctcattctgttgcccaggctggagtgcagtgatatgatcacagctcactgcagccttgacctcctgggctcaagtgatcctcttgcctcagcctcctgagtagctaggactacaggcatgcactaccatgcccagctagttttttttttttttcttgtaaagatgaggtttcactatgttgcccaggctggtctggaactcctgagctcaggcaatccttctgccttggctttccaaagtgttgggattataagataggtgtgagccaccatgcctggcaacaatagtttataaaagggcagattgtacagggtagcagagagatttgagtaagttattaacacagccagaataatccataattattgtgtactctcagcaatttattttcatgtcgatattcctgttcaggtagcctcctgtggactggagttaccttcattttgctttctgatctcactttaatattgctgttctatctcatttttttagtatctaaaatttaagcttttcaagataagtataactttctggtatcagtatatacagtatttgctgaacgaattagaaataaaaaaactgggattgttttgctgcatcacttaaggatatcaatatttagtttttaaatgctccttttaatcagtattattcagttttaagaaaaaataatttttctttgaaatgatcaatttttagattgaatttttatttgataaggtttgatttaattaattaaccatcagttacaggtttttgcaggatttctagtactataactaatgattcactgtgatttttgctgttgcttctcaccactaatacttagtcttttgtgatagccttgaacagcatccttgatggaaacagtaacaattttgatgaaatattttgctctatttgttatggtggaaagtcagtctactgagcttttcctatgagatgtagcttgcctgtgaaggattctgattttggtaattttaagaaggcaggagaacactgtgggacacttacttggaatgaagttcccttgattttaaaaagaatttccttgcactgtgggagtctgttagtctatttcagagattattgtcatttttattctttccttcttttatcaataaataatgactccatattaggtatttttatttacattgaaatatatcaaaataatgtttactatttatttttgaaacttatatgttaaaaagttaagtccactttcttgtgacaaatggattaagggtatgtgtgtatgtatgcgtgagtatacatattaatatatatgtatacacaatacacataatataatatatatattttagagacagggcactctctctttgtcacccaggctggagtacagtggagcgattatagctcactgcagccttgaacttgcggactcaagtgatcatcctgacacagctgcctgagtagctgggatcacaggtgtgccccactgtgcttggctaattttaaaaaatgttttatacagacaggttcttactgtgttgcccaggctgatctcaaactcctggcttgaagcgatcctctcatcttggcctctgaaagtgctgggattacaggcatgagtcaccatgcctggccatatattttatattttaaatgatatttataattggtactgaagaattctcatacaaaaatcactggagaaaaataattcgaagtttgatatattttgtgtaagaactgatgtttggtttttttaaaaagtaaaaaatagttaatgagattatagtcaacatttttctggggtaagctgaataaaacatgaagtcaagtctttaacatatttggatttgcacaccttaattagtccgtcctctatgactttcttgttggagtcattcttccggttataaatagccccggcttggtcatccaaatgaacgtgcatggctattgtcatttcattgctatggcaattttgcaattagtgtggtagttgctggcacacttctgggcaagggttttgatgcattgacttggaagtggaagaatgaaactgctttcacagctgctgtgtgattctgaatagagacatagcagctgctttttttttttcttcagttttttttttttactaatttagatgtaggcattatgcttcgatgaattgttggcaggaatatctccttgttcccctgtctgtcaaaggaaaactaatttggatttcaagtaaatattggggcaggttgtttgtgaaagtttctttcactccttgtgaaagaaagtagtcctgtaactggtttttctgtctatcctttatcttcaaaacggaaatgtcacaagttgtggaataatcagtaactgacaaataaacttcactgggagatttttagttattgaaatgtatggatttgtcccatttctagggataaaacaaaaagttgattggaggcattaatgagggcgtatctatataaaataagttgtaaaatagataccggaaaatggtattaatagaatcattaatgaaggggtatctatataaaataacttgtaaaaatagatgctggataaatgatatttatagaagcattaatgaaggggtagctatataaaacaacttgtaaaatagataccagaaaaatggtatttatagtggctagcttgctattaacttttttggtcaatgtcacttaaaatgtgagctataatggctccttattcttccatcaccaagttctcataaagatagataaagcagggtagtaaatcagtctttcaaaaggaacactttcctctaaatttagagcataattaatgttaatgtcaccctcgaagatttgaggaaaattttctcctacaactttaatttggatgtttatagtaaaccctttaattttttttccaagagcttattacttttcttttaaacatggaaactcagtataattttcttctagaaatatggaagcttatacaatgcagtaaaacttagtttagacattgatttctctgctgaaagtactcctaaaatatcttagagagttgatgttttaagttacaaacgtcttcttctattttttcctgatagtcctcagatatatatgcttttttttctgttttgcattatgagcaaataattagtacttctttacatcagtatccatgttcacaagtgatggatcttttgaggttttgggatttttttttcccctgaagctacaaaaataagaaagtaagaaatttagtttttttcatgaataataatcttgatttctgctcaggggactatcctctaccatcagctagggcagattaaattgaagattgcaggatttctcattataaaactgtagcctcacaagaccacctatctgatctcttaaaaacttaataagcttatttttggtatgtattttttaacacatcaatttttaacaattgacttttgtatgtaataagaagtaggggttcaattttatttttttacacatggatacccagttgtctcaccaccatttattaaaaggtccatctttcccccctgatctacagtagctgttctgttgtatgtcaagggctgatgtgtgggtgtgtctcattctgggttttctattctgttctaatggcctttctttttctgtatatactgtgtttattatagtagcatataataaatctcgatatggggaagaagtcctcctttatttttcaagagtagtgactaatcttggcccattgtccttccagcaaggatcaacttttaaatttcctttttttttttttggattgtcaaatttgaaaacccccacaaactcatttgggttttgatgtcaactgtattaaatctgtatgtcaatttggaaagtacagtcatcttttgatgttcatgggggattgggttcacgaccccacttgtgtggacaccaaattctgtggacgttcaattcccttgtataaaatggtatagtattggcatatgtccaacacctatgcttcagtgtaccttaaatcatctctagattacttgccgtgcctaatagaatgtaaatgctgtgtacatagttgttacactgtacctttagaactttgtattatttttgattgtgtttctttcccagaatgaccctctatatttctagttatgttttttgcctcaatgtttatgttgtctggattaatatggctatcttcactttcttttgtttagacttttctctgtttgttttttatccttttgcttttagtcttgttcctatcattttaagttatgtttcctgcacaagactaaagtataaattttaagtccagactgattgcccttctttttacttggtacatttgattcatttatatgtattagatctaccattttctgttgccttttctttcccagcttatttatgctgctgcttctctcctttttgcctttttgaattgccttgcttgtgtgtgtatatatattttttcatacaattttttctcaagtagtttggaagttgtatttgcatgtatttttagtagttgccactgaaattttactcatacatatttaacataacaaaatctgaagttacataatatctttatctttattctgaataatatatgcaacttaaagcacattaactttctttaaccttctcccaattttagttctattgttgtcatgtcttttgattctcttctcttgagcttgcatttatgcaccacaagataactgttaatgactttaaaatttattttctacatctttatcattttctatgctcttgatttcttcctgcatctttattcttgcactatccatttgggatcactgtttatctaaaatacactttcagaatttccttatttaggaattttgcccttgttcttgaaagatacttttttctgttggactagaaactaagttgattgtgcaatgaggatactattttactgttttctgggttccattgttactgttgaaaagtcagctgtggtttaataaagaaattctagcagcagtgagaatattgagtatgcccaaagtaaagcgattatttcttgtttcctacttttgtatttaaaacaaaaacaaaagctaaagcaaaaaaacaacccagtgtacatgggaattttcctttctgcgttgatttctgatccctttccataagtatgaagataaacacacaagcttaaggttgaacatacctaaagaaagaaaaccttaggattttggggatcctttacaacttgccatgacaaatgtaacaaaagaaggttttcaagtttttgcatttactgctacttatttaagtagttttcatcaagttaaagtcagccctttgaaaatgaatgtaaattatctttagccatatacctatcatatgttatttacctgtcatccattcatcatccttccacatctgtctatatgtctgtgttactatatgtctgtgatatgagctgtctgtccatcgatgcatccatccatccatccatccatccatccatgcatccatccatccatccgtccattaatatagattttcatccacaatttctggcttacaactcccatagacctttgttacagtctttttaaaataatattggggccctttgggccccagaagtaggatcaggaaacagaatctctctctccctggccttctcttgatctcctttcactgtccaagacaggactctaatcttccattgtggattataaggcccccagtccagagagcatcctccctatacccttggaggaaggaatgccacacagaagggtcaagaagaatctaacaggcctttctgggtttcctcattcattctgttagtgtaaggtcataccctttttgtccgatcacattttgatatggttatctatgcttcaatcatgccttttcaatgaagtctccataaaaggcccaggaaactagctgaacacatggaggttcctggagggtggcacattcaggaagggcatggaagctccgtgctccttccccatacattgtcctatgtatttcttcatctatatccttcatcatatcctttagaacaaaccagtaaacaactttccctgagttctgtgagctgctctagcaaagaaatcaaacctaaagtgggagtttgggaacaccagcatgaagctgattggtcagaagttgattgttgtggtgtgagagcagaggaaaaatagtttaaggttttccatactcaatgtgtatctgttttatctatctatatgtctatcttatctatctgtcatccagttttccatctacttcctctgtctcctctggcatagggtattgactctgtataaatgaaatgtattgaaatgtgccattagcatacttgtagatggagagtttgtaaaaatctaataaaaagggataagacaatggagctaggtgttttacaatcaaatcattgagtagcagcagtgccaaaagttatattacctcatcatatgtcaaagaaaatcactacctctattctggctgtgtcagtgtctcagagttactgcagcagaaataagtgataatgccagcattcatgccagctaatttgtacaagagctaggctctgttggctgagtcacagctgccactagatctacaagtagagtgaaaagatgtttattagccatggagagtaatacatgggtttattttaatcaacttgttctaaagccagcctaagagagatgatactgcccttttcacagtcatctgactcgttcatgaagtgtttgtcatataatgtagagtctgtttctcagaatattatgagccatagttacggcatcttgcttatcacccttcgtaaatgttaggtagctatataatctttttcagccctacaggaaaaagtttgttcaaatgttgtaaaatgtttcaccataattagtgcctgccatttcaaagaactaagcaatttggagttacatgtatatagctggtttactgaagaacaaaatatgaaattgattaagtccattaaaataattttggctgcatagtaaagagaatcaaatgacgttccctctcttttttttcagtccattcccttttatctttagtgagatctagctttatgatgaaagccaggtgatacagaactagagctccaaaaaacagactttttgtttcattttaggaatgcaatttctaattcttctcattgctctgtaacaaacttttctattttctaatttaaaagtatcttggaagatcaagtgcaaaaggtatgcatgtagaaaataattccctattttatagttataaaataagggaaagtgaaggttaatttggctgtgtttttcctcaaacattggaaaactgactatagttagaggactatgattgccatggattatcatcgaagaccctgggaaaacaagttatgtgacattgtttgtagatcttaaaaacatgcctttttcttctgcatgtttacttcgttaagtttttactatatatttatagtaaaatatatatagtaaatcaatctatctatctatctatctatctatctatctatctatctatctatctggagagaaattttcaagtgtaagcagcatagggacatttgtatgccctagatggaaagataatattgtaagtggttgatgaagataatatccgttggtgggtggcttttattatttttaccacttaaaaattcaaaggccaggtccattcagtctaagtttcagacacaggaaagaattaacagagatctttggtaattaaggtggacattatgttgccctataaactgtgcttctttgaaagttgaaaaaataagcagaaatttttgtgtaaaaattattcaggcatagtgttccaactgcgtaaaattcttagccattgttatcacatgctagaacagaaaaagaccagttaatgctttgaagttgatatcagagaggtcaagaaattctatcagtgtagctcaagaaatatgttacttagaactaagaaaatagaaccactggaaaaatggttaaggaaacgctcagcagtgtacccatttacctggatttctgtagtccaaattaagtaaaatattaaataaaacactcgagtcacaataatttttcctcaaatatctgcagttgttgctctatgtcatttcatattacctactttttattactttatggacaagctgttttttcttcctgccccacccataaattttttttaaatcaatttttattaaccttgcaaatcagaaaattgtataggatgtttccagctttagcacccatacctgagttcatttatttttcttataatggtttctttttcaacaatatcttttatcattgcaatttcctttgctttctgctcatggagagcatattaaattgatgttctatacttctgattcagacttcacacagcttcatttctactctttactgtgtccagtatggggtttacttttgttattattatgtattctgctattaaattcgtgtgtttttacagtccttccttatgctactcatttccctatttaattttagtctattgtctttttatttgattccctcctcatggctcttcgtttctgctttttttgtttgtttgttttgttttgttttttgacacgaagtctcgctctgtcacccaggctgcagtgcaatggcgcgatctcgactcactgcaagctccacctcccgggttctgctttttaggcaaggtcaaatcatcttataaaaagaacagcttgaaaaaatggtggagactgtgttcatttattattttgcaactctagtatttccttcaatagtttattctattttactcctcagccctttattgtatgagcatttctatagctaaattctagtcctgggctagtcatattctgtacatattccttgtgcatttcattgacacctatgcaattatcatctgtattcaggtgattcacgtccttttagctctgatttaggccacactgttgttcttagaacatttgcctctagatgtcacatagagttaaatatgacaaaacaccacttatgctgttgcttgttaaattcactgccttggggaaagcatattgatttcttattaacctttgtgcattccacttttcaggtggaaatgcatactgcttctgcttatgtagcacttcatacagtgatctttcccatgtttttataacctcttaaatctattttaggaaatttcttgaatatcaatttcttattttgccatcacttccagtcaagaaattctttctttctctgtgtttttccctggcctttctcatccagtgttgttctctttataacactactattcttaaacttaatttaattgatgaatactctctccaaaaagcagaacttatttccagtatctgaaagttacaggcttcccattctaatgtgtatgtaagaatctagtatggaataagaagggaatggttacataagttatatcttagtattggaatattatactgttatttaaaatgattttgtactataagggtgccaaaccagggtttgttgtatgtggctctgtagagatgtgttttgtttggctggtgtttttttttgttgtttgttttgttttttttttgtttgttttttttggcctgtggagtgtgttgtaccttagttgttatgcaagcagcttaatatcttccactcagttggtctcctatatttgtggtacctgcctagcttatgtaggaagtttgagaccatttttggaaaagaatattttaaagagaaggaaaatgctgtatgagtgaaaactatagatttgtagaaaaaaatactgacagttataaacagatttaaacagtggttatctatgagtgattagaggcgatttttattcactttgcttcttacctgtagtttccaaattttccctaatgaatatcattagggaaaccaatcagttaaaaccaatcagttaacactagtttaaaagaatatagttttgtgtatgcattccatagtactaatcaataactttttattaatcaataacttagtctacgcccttaggcttgacacttaggcaacttatagtacagaagatatgtgaaatctgatcattccattaacaggcttgtagtcctgcttggagagacaaacgtgatacaggctctactgggatgttaccagtgaaaaaggacatagacagatagaagattctcaagcaatctaacagaagtggtcattttagccatgggagacttcactgagttgaaaggctgatgacatgtttgtgatactatgttaagagctctttaagtttgtagaccattgacgttgctagttatctccacagagagaatctttcttataacctgactcttctgttacaggcattttatgttggtattttgtacactttgaagtttcccagcatcttttctgagtgtcttaagccttattagaaaaaagtagaaactgaattctaaattgttaacaacctggtaaccatagatacttgactgtttggaaaaaatgtaaacatatcagccctgagcaagacagccaaaccaaaacaaccacagcgagggattctgattcctttgacagactctgtttctttttattaaaagtatttctttagagatgataaagcaataatttgcaaaatgaaattagaacatcataatccttcttgttcaagaagcattattattaaaaggtagcttcatgtgctactaagaagctaattagttgttgcctggcttatcatgctgagagacagctgtgattcatgggtatttatctatcacaacaggattttctaatggtatttggttatgaaattatttatacttctgactcaggcctttaaaagggcttccagccgtttttgaaagccaacttctgcactccagagcgttttgtgctgttgagatggtgaatcagcttggcagtgtggtagtgtgtgaatccggtcgcactgcagtgtctgagatgcagttttctggtgaaacttctcaagccaagtgcgataatgagtgttcattgatgtagatcttataattttgtaggaaattttctaagaaactgagctttttcaaaatatttagaaataacaccaacatggatttttgtggttatgtttactctaataagctgttaataggaatttataccattatattccttgtgttaatttcaatgtgtgagtttagtatggactattaataacttgttttttctttatcaggcttttattttatttggttagtgattagaataggaaagaaatcaaaagctcttcatagaactctcctgaactttaaatatttaaatcatatttaaatattattcattacattcatttttaaagcacctaactcttcattttgaagatctcaaatcatcatctttgagttatagtaccagagcaaaaatgtgagccttgatatattttctttctttaaaacaggttttaggtaaataacaggagaaatttttgctcatttatttgaatatttctgtggcttatataaatcaagggctgaattacacaaatacataatagtgatttgaaacagactctaaagttaagcagtagttttacttaaccatcccttcttaagtagaataatgagctttgttgagggacaaaattccatttgttttcccaaagtggaaagtagattttggggtgacaaagccttcatgttcaaggttttccacaagtgagctccatgtttagaaatccataaattatagtttgcatgggttgcttttattaacagcaaggtgagttgttaacaggccctgtgcctaacatgtgcgtattgggcagatgtgagtagactgagcacggatcctcctactttcccagtttcataaagcggttttaaggtttaaacttgcctagtcccaaattatacaattaatcatactcagttgtcatttttcttactaattgttccaagctctttaacatgatgtctggtggcagtaagtcacttagcaggcaatagtggcagggaagagagaagactcttttgcccctagaagtttatgtatgctagtcaaagtaagaaggtcaaaaataaaatgtttctaagacatttccaaaggatcacataggcatgacacccagcccttgaatggcacattacaaaggttagaggacctagatctgtgagacccattttgacattaacttgccatgtggctttctgaaaatctctttatatctgtctctggggctgggcatcattacctttcatagggggataataaattatatcagttccaccagcctgtttataggatttttttttttttttttttttttgagatggagtctttgctctgtcgccaggctatagtgcagtggtaccatcttggctcactgcaacctccgcctcccgggttcaagcaattcccctgcctcagcctccagagtggctgggattacaggcatgtgccaccatgcctggctaatttttttgtattttagtagagacagggtttcactatgttggccaggatggtctcaatctcctgacctcatgatccacctgcctctgcctcccaaagtgctgggattataggcatgaacaaactgcgcccagcctgataggatgattttacatgataagacaaaatgataacatagaaagcctttaaaaataacatagtattgaaaggtaaggtagatatttgctcgtcatgaaccttctcagttccccctcctagtcccttaattgttggactgtttcaggattctattctaagcattcttctcgtatgccattgagtgatcttatccatttccgtagtttcagttatgcgcattgtccccatagtaccatcctttgagctccacctagttgtgtaactcccaagccctacctggccgaatgtcagtttgatgttgcatttgaagaaatatagtccagcaactaaaagcaatagtaaggcagaactgctcttaacttatttctcttgaagaatataatagcatgtagcttacaaatcagcattatttcttaaaatcgctgtcatctcctcacttccctgctcaagggttactccctttgttacaggctcccattttccccagactcaccccgagactctcactcacaactgttttttgtcttttttggtcttaacttctcccaatatacctcatgatttgcccatgttttcttttctccaccctttttttgcttagcatgataaaagctcaagaactagactgacaaagaccaaattctcccttgaggataaaggaggagacaggttattctggcgaagaccttattgggtaggggaaacagggagggggtgggaccactcacatgtaaataatctgtattcccagcacaccatcaagcaggccacttactatctacttctatatttcacaaagtgcctctgactcaattccatctatgacctgaccttattatcttgtactcaaacttcattttttccctccctatctttgtacaaagtgcccatcatgctcctagttgctttttcctgacatcaaaacatcatcctcagcttccttctctctttatccttcacatcctattcatattctctttaacctagataccaaagacataattctcaaatctcttcatttcagtccatcaccattgctgccactgtacgtgttgcttccctgcaatcaattttccgtactccaactagaatgatctagttgatcctgatcattgaacctgatcatgcatcttcctcttctaccctattcagaggcttctgcgcactaagcccttaatttggcctttaagatcctttacactgtggttgatccttgcccatttctctaaaagtagtccgccaccccttcctcagcaggatgcttttcgtcctgcctgaaggcccttacctaagctgatctgattgtctgcagtacctcccaactctcccctatctccaacctactctcacttacttattcactacatctcagcttaaatatgacttctatccaaggcccctctgactcttcaggctgggccggtccctttgctatagtctgatgttcctcacacttcccctttggcaatacccatcccactcgactagcagaccctaagctccacgagaacagagctcatgtctctctcctacagcactatctccaaagtgctaaacacagtgcccagctcagatccagtgtctgatgaatactcactgattaatggatgctgcttccatgacttaggcgccctctgtctctcccatcttatctgcacacatattccgcctcacattttctatttatctctcagaaaaccccgtgtcatttcatataaagatttaagctcatgttctgtgcagaattgtctgcccaacctttccaactaccacctggtcattgtcagcttgccacagtagaatccagtgtatagctttattatgacccttaccatgttattttgaagttatttacttgattgtatgcttttgtgagtaggtcttgtgtgtactttccttcatagcagggaccctattttatttgtttgtactcatccttataatcctgtcacctactatagaaagaattgggatgcctcataactagagatgataataagaataaaaataattgctgatcttattgactaccttctgtaagccaggcacaattttaagtgctttacttaactcattgaatcctctcaactcctatgaagtagttacttttattcttcctattttatagatgaggaactttagacccagaaaagtcaagtaagttgtccaaacttaaccagctgataagtggcaaggctggaattgaaacccactggttccagagccttcccttacttatgatgatccgtcaatatagtttgtgccatcaaaattgggttttagaatcttgctgtctgctttaaattctgattcttctacctactcatcatgtgacctgaggtatgaaaaatggagataattacatgccctttaaagggatatcctgaggattaaataagattattagtccctataaaatatctgctgaatgtaggtagttgttgcagtgttaagtcagccagagcactcattggacagaaggtctttcatggttctttccaactccaaatccaatgagtctgtcttcaatctttaccctttgtcagtacgtattactttcaaagctctggtgtttgttttaaataatcgaactttatcagggtctgaggacatacctgcatttctgtcaagtaaaatctatgtgttttttatgagcatgtgttgcctaaaaccacagtcctgatttcccatgctcaaatctggggctacatggctaaataaagatctctgtctaaagagaacaaccaaattcctgtttatagtcagaccatagcagaaaaagaaatccaagttgtaaattattgtttgaattatgaaagtttgagatgttctaatagtaaaagaactaaagagaatatacaaatcccgtgtcaacatttgcagcagatgtttgtttcctctttccaagttagatgagggcatttcagggtggtctgtgttattaaattgattagcagtcaaatggaaacttcagctgcttaggtgatgatttaattgtgaagactgttaatactgtgtctattagcacatgcttattattctatgaaactcaaagtcgtaagattattgacaggcactacagtagcaaacaacattggtggaaattagtatctagttctgagacttaatggtttgacttgtgtgcaaatttaataactacttatcagtagttatgcaataatacagtgaattttcccaaataaatatgtattacttaaataaatcttgcctatctgttcatctatgtatttatttgccttgttcaaagatgtaacaaagcaaataaaaatagaggaaaaatacacttataataggataaattacaactgttatggcattaggagagagtttgggtcacaaaataataccttgaagtccaaaacattggatggaggtgggcctttctgactgtgtacataaaaagggaaatgaaaaaaagctgcaatttataatagccatcaactaacaaaaatcacctgtagaaaaccacaactattgcagttactgagaccatagagaaatgtcacttgctgtatggaatgtaataaatagcaccttcaacagcacttgtacagaaaacacagcaacaggtttcttagtactgattccttcaacacaagctgtttttttgccatcataaattcgttaaaaagcaattagttaaaagcaattctatatagatctgttttattcattttattgatgttctggcttaatctaaggattgatttatagtatctagagatataaacattaaattttttaggcaatctttttttttttatggaggctttggtaagtattgattagatacagcaaatcagtatctgtccaacctttgggtaaggctgaatactataacaggctaaataatactaaatactaaaataggctaaataatcagacatacatggaaattgcaggggccacaagagggtgagactttaagaaatcatttggattggcttaaagttctgtactatacaactttaggtttttaaatacacagtaagtgtcaagatcactctggagaattttaaaaggacaatctcatcccccacctctgtagttttctatttagtaggtctgaggtgggtgaggtaagagcaattttatttaaagaaaaaagtcacatgagtaattctggttatcagtgaagttagaactactgccatagagaatactgcattaatttcagatagaaaaaaatttaaagctaatataatcaaatacaccttagctgtaaaactcttttattctgaaatgtatacctagccaattgaataaggtgatttattatatgaatttcttattagtaaaccaattaaaagtttagtaaatctactggcatctaactatgtctttgaatagttaatatgtatcctaagataattttttattctcactattgtctgattacatttccatatagactaaaaatatttcagtaatcattctatctagagaactttttttgctatttttagtcctcaagaagttataaagcatacttatatgcactctgaaattatcttaggtctttaggggtgctttcatttgtaggctttcaagtgataataagaaaaatgatatctcacatacatttttacttgtctgcagtagccccaaattagttatgaacaaaatcttaaatatgtggtaaacctttgcttaaagtagaaaaccaagcccatatatgtaagtgtatgcctaaatctagcattagtatttattgcaacagaaatcttgagtaaatgtctcacatttacttttcattgtttttataggcattgcttctatgacagtgccagtgtacattgcggaggtctcaccacccaatttaagaggccgattagtcaccattaataccctcttcatcacaggagggcagttctttgcaagtgttgttgatggagccttcagttatctccagaaggatggatggaggtttgtaaatactttttacatttaatttttcaaatcttgattttggggaaggggagaaaaattgagaaatcatagtcaaaatatagctgtgtgttttgaatcattattgctaatttataagtaggtgacattcagcaaaactgagagtggacaggaagctgatatttattttgatgatagacaaggaacctaccattaagaattgatatttacagggcttttttagcatttaggtgacatttctcacactgtgtgcaatcttttgcaatatttgtttaaaaatgaatgcagtgataaatatgtatggagttcatgaattctacaatgattgacaagctgtttatgaactacagatataactaacatcctttttgcattctggaagctacattttgatctgaaagaaacgtagtgtttaaagataaaaatatacctctataaaaagatatacatgagtttaaagtatacaaattattccttgatatttggcttattttgaatcaataaatgacaaaagtggttttaaaactgctttaaaataaatacaaactattattaaaacaaaatcttatgttaaagcttaaaagatattatgggctctggattttgatatctttatagtactcatgtaactgttccagagaaattttattaaaaggcattagaggttatacaatattgcctatcttgttttcttgcctctacttattagaacaaatatttattcagtatttacttctctgtagatactggggaatagaatattcaacaatataaactcaaacccttgtttgcatggcttttacagtgttgatgttaatcctcaacagtagaagaaaaaagggtgtggactgggtgtggtggctcacgcctgtaataccaacacttcaggaggccaaggtgggcggatcacttgaggtcaggagtttgagaccagcctggccaacatggtgaaaccctgtctctactgaaaatacaaaaattagccaggtgtggtggcacacacctgtaattccacctacttgggaggctgaggcaggagaatcgcttgaaccctgaaggcggaggttgcagtgagctgagagtgtaccactgcactccagcctggacaacagagcgagactccatctcaaaaaaaaaaaaagaaagaaagaaaaaggtgcaatatgatgtggacccagggaattaaactgcttgtaagaagcacgataaaccttgtggcttaggatgagccattaaagacctaaatgggtgaagttttaattaaaagtcatgtgagaaaactctttgaagctaatgagggcctacatttgtaaggaccattaaggggaggacacagtttttaaaaacggttgttgtgtctgcagatgttgctaaactgaagcaggaagtttctttcttcttttttttttttctactcagtagatgaagagaaagaggaaagacgataactgttttcagtataacctggtattttgagtttttcttgtaaatgcaatggaagtcagtctttcaacttacatgtctttaagaagttctaaatcatcaatttatattttgttaaaaatttttattaatgtaagtaatatagatatattcaaatgcatagcatgtatagttgcataaatcacatttttcacttacgcataacaattaagaaatcttttctcagtcctggttaggaaagagaaagatctcacagtagtgacaatacatttatgaatgtggtgtgcccgtgtaaaagcggaggtgttgggacaagcctgaaacccccttgcagaggcaaggagacatcatagacagacctggattcaaatctgttttttaccattgattagataagaaccccaaacaaatcatttagcccctctgagcttcacttttctataaagtagaaccagaaatacttataagattattgtgggatccaaattacttattatatgtaaagtgtttagcgtagcacttggcacatggcagataataaatgaagaatcacattgttagttgctgttctgatgaattgagtaaaagatggatgctactatcgatgttgtaagagaggctgaaggaaaatcaacattctgtgttatctgttttctttattggcaagaatgatgcttcaagatggtagggcagaagactagagaaaaaaagatttaaagtgtattgctgctgtgggaagcatgagaaggaaaagactagggacaacacatgatttccaagtaaccatggaatcccagctgaagctggagacatatatttgcagtaaagccaattagcatgctcatgtttatttttctggcaatactggattgcctagggatgaaaaaataaaataagagtatgggaaaactaactcccgttgatatatagaccaaagtattaacaaccagattgttttgaacccaatttattctttgcatgaatacacatttaattatgtacacatgcaaacatgtttccttttttttaggtgaattttctctgttattgtcttctgttatctagtatccttatcagtatatttatctcatctgactcctgggctaataggaatgtggttataagcaaataaaaattgaagtgctaccttagcattaactttagactctgtaattgtcaacaattgataacttattcataattataacaatagataactcatcacttttatagcaatatgtttcaaaaatcttaaggaaaaatctgaaggaaaatgtgggtctaaatatatcatgtaaaatttcttttccatactcatatttttatatatcttcacattagatgtccccagtcttcaaataatttgaatattttaaatttgttttatttccctttttggcttttattgcttctgaaactctacctcaagtttctaatattaaattttatactacaatacccagtgtcccagatttactggtcttgcattatagtgatgaacagtttcagcgtctggtagcaaataccatttgatcctaaccaaaatcttgacaggttagtggaattggtattattctcattttgcagattaaaaacttgatgcttagagaagttaaatatttgcctgagaccacatggctattacttggccttggcagagattagattcaaatcttcttattcaaaagctaactcctttcttcctcatggttctgctttcaagcgtttataatctaacagccataatttttgataatttttacagtagtgattggattaagacagatggaagatgaaatcgattgacagaaaagcaatttagattttgatgttgtagaaacattatagttcaccttttatgccagatgggtcaaagtttctgttctcttattttttagatatcatagaaataaattgttttctgctgaacaactggaagtttactttctctagaaaaaaagaactgccagtagcagaatcaatgttgctatttttctggcacttcattatcatagtacattctgtactgggaaggataccatctggcttcatgaagaaagaggaaataaaattttgaaaatattgttaaagatttgattttttaataaaaacaactttattgagatgtaattcatgcaccattcaactcatccatttaaattgtacaatcacttggcttttagtgtattcacagagctatgcaaccatcgccacaatcaaatttagaacattttcgtcaccctaaaaagaaaccttgcactccttagccatcaccccctaaccccccaagctgtcccacatttaggcaaccattaatctactttgtgtttctataggtttatgtattctgtatatttcatatatgaatatgtggttctttatgactggcttctttcacttagcaaattttcaaggttcatctaagttgtagtatgtgtcagtacttcatttctttttatagcaaataataatatggatataccacattttgtttatctattcatcagttgataggtattgttaacattttggggctatataaataatgatgctatgaacatttgtgtacaaattttaggatagacataagcgtttacttctcttggatatacacctatctgtggaattgctaggtcatatgataactgtatttaggtttttgaggactggccagactgcttccaaagtggctgtattattttgcattcccacaagcaacgtatgagggtttcaatttttccatgtcctagtaaacacttgttatttgtcttttttgattacagtcatcctagtgggtgtgaagtggcatctcactgtggttttgatttgcatttctctaatgagtaatcatgaggataacttttttttttcctaatatattgtagtgttgacaaagatggcagagatgtttcgatagttaatattaatgataaagttctatcgctgcttgcccttttctttgcatatgtatatatttgcattatagtgacgaacagtttcagcatctggcagcaaataccatttgatcctaaccaaaatcttgacaggttagtggaattggtgttattctcattttgcagatttaaaacttgatgctcagagaagcatatatatatatatagtttatttttatttttagtagagatgaggtttcaccatgttggccaggctggtctcaaactcctgacctcaagtgagccacctgcctcagtttcccaaagtgctgggattacaggtgtgagtcaccatacctgtcttctttgctaatatttttaaatcttacttcatgaacatagtgagatttactcactacacttcaagcaaacaaaaaatatccttttttgaaaattgcttagttaaatcctggcttatcagtaaatatatagtaagtgaacttagccatcagaatgatctgtctagaaaacttatctgggcatgccactagtaaaatgtttcaagactgtctatttcctacagggaaaaaaaaattaaattctttatcatggcttgtagtacccaatccatgcattcttttcaagattcttctaactagtgttgcccccgactccactttgtataaaacccaagcttataaaccaaccatatcttgctttgtcatgtttctagttttttttttttttttttcattcttatgctcttttttgcctgtagtgtctccctaccctatccagggattctggtccagctcctgttcatcctgtaaatctctgctcatgaatcatggaaactctgttcctttgtcttttcataatagtttctacaaagctccatttttatactcaccatattatattcaactacttgcttactcttctatctcctctcattcattttggaactcctgaatgtcattgaccttttactcatttttagatctaggaagggcgcagaacatagtaaatattcagtaaatgtttattgaactgagctgaaattcactgggctctagggaagggactcttagttagcataaaaagatatttattataaaccaaataccaatgtattaatttatacagagggatatatatacttcatagatagataaaaattaaatcattaattatatgtgtttctgcaggtacaaataagagaaagaaaattagtttctgagcctatgaaaatttatctccttcaagagaatatacctccctaggaacctgaaaactttcattattttctctttggtaatgctgattttcaaatgagtgtctctgtgtttacaagtatatagtcatcatgtgatttgtattaatagggataggtatatatacagaggggctaaatttttctgtttcatgctgatttttactcatcttattcctagatctactttaaaaaaaaaacaggcttatcttattccacctcactaaactatgtacaaccatttgttaaatgtctggttgtgctagtcattttcatgtttcatcatttaattgatgtaatataggtattgaatgagaaatacaaaatattagtcctgggaacctctataggagagattttcctgagtatcctgaggctgactcatgcacaatgtgagacatgctgagttttgaagaattgatgggactcaggtggacacaggtggatatgggaggcagagtgtagaccaggagggggtaggatcagggaggattaagactacagtgatgatgtacatgagaggctgaagccagattccaatggtctatgaattcaagtccaacttctgtctacaggcaaagggaatttattatttttttagcagagtgtgccatgacaggagtcaaagatcactacggcagtgatgcccagaactaactggggctctcgcctcttgggtagatttaggaaacctagttatgaggctgctgccaaggtacaggtgtgaggttatacttttggagtcatcagttggtgtggaaataattcagtcattcattcaaaagagtttcttgacactttctgcatactagtcttgtatttaatactagagatggaaagatggataagaagtgctcctcctgtcctgaagcctctaatggcctaatataggagagagactttttttagtctgttgaataaatgatggatatagtgtaatgggagctcccaagatgaatgaataacttagcctcacaacagaaagatatttgagctttttgaataaaagaattccaggtacagtgagggagagggaaattctaggtgaaatgtaatcttcaaaggccctgtcatctgaaagaaccagtcatgcttggacaagagtgagaagttagagcagctaggaggagggctatgatgatcatctgggagtttgggggtgaagtgggaaggccggcctttggtgggtgtggatggaacttgaaatcctttgctctcactttcataacacattagatttgggtttgtttattgaaagcctcaaaaaagaccagcctggccaagatggcgaaaccccgtctctactaaaaaaataaaattagccgggcgcggtggtgggcgcctgtaatcccagttactcgggaggctgaggcaaagaattgcttgaacccgggaggcagaggttgcagtgagccaagatcatgccactgcactccagcctgggtgacacagctagactccatctcaaataataataataataataattttaaaatccatgtcaataagatgcttctcagaatgatatttaaatggggatgttatttctaaacaactttatgctggagaatgtgttcttaaaatttcgtgctaatagatcagtggtacttggctctatatgaaatgtagaatatgagtcaatcactatcttaaaaatagaagtatgcagtggtcattttaagaatgatagatttagataacacatgtattaattggtggcaaacagtctcattacaagtaaatacctgccaggtgccatggcttatgcctgtaatcccagcactttgggaggccaaagctggtggatcacctgaggtcaggagttcgagaccaccctgcccaacatggtgaaaccccatctctaccaaaaaatagaaaaattagctggatatagtggcacatgcctgtaatctcagctactcaggaggctgaggtgggagaatcttgaacccagaaggcagaggttgcagtgagccaagatcacgccactgcactccaacctgggtgacagagtgagaccctttttcaaaacaaccccaaaaagtaaataccttagtgctgaagatataaatacgactgtttatcatgaagatattacagtgtggtgggaagaatatgtttaagatttgctttcacagcgtatgaattaatttatctaagctctaatagtctcacctagccagtgttccagcagtcatacaatgttatttacgggatcaaatgagctagtagcagtgaacatacttacaaactcttcagtgctattaggtattgtttgctgttatcttcagaatgttttaggttaagtctctatattcggcatttaagctggcaataaaaattgctctcaccttcagttatctgatttttttccaggaaaatgtaaacatggtttggtaatgacagagcagtttgtataagtctaattcccctgaagatgaccattataaaacatggacagaatgtgtgaatgtatggagcatggaagatatttaggatagtgaaaatactctttattatactttaatggcagatacatgccattatacatttgtccaaacccatgaactatatagcaccaagagtgaaacctaatgtaaactttggactgtaggtgataatgatgtgctaatgtgggctcatcacttgcaacaaatgtcccactttggtggaagatgttgataattggggaggctatgcatacgtgggcaggaagtgtgtgggagatctctgtaccttcctctcaattttttgataatagcaaaagagttggaggcagtaaatggaattatatatttgtgaagcagtatctctaggtagactgataagtgaaagatgcatgtttttatctgtagaacaatgactagaatatattacaaaaagaaacacataagaagccattatgagcattaaaacgtaatacttaaaatatttggataagctgaataaatgcaataaattaagaacacaggaatgaataagagatggcacaaatagcaaatagcaaaatggtatacctaaaacccatttatggtaataatcgcattaaatgtaaaaaattattgtgtactaaaaatgtggcacagatctacattgtctaaagagacacactttaatgctattagattcaaagtgaaaggttgggaaaagatgtaatatacaaaagtgagtataggaaggctggtgtggctatattaatagtcacacaaagtagacttctagagagacagtattagcagagataaagaaggacattttctaatgacaaaagagccaagtcatccgaaataataatgatacaaaatgtgtagtttatctaataagatagcttcaaaatacatgaagcaaaaattatcagctggcagttagccagcagtgtgaatgcacttaattctgtagagctgtatacttaaaagtggacaaaatggtaattttatttatattttaccacaataaaaaaatgggcaaattgagcttatatttgcagaatttttaactcttttttttaacaacgatagaacaactagataaaagattataaaaaagcagtacaatactattaaataccttgtcaaaactgacatttgtagactgctacatccaacaattgcactatacatattattttactttcccttttcctttccttttccctttccctttccccttccctttccctttttcttttctttcttttttttttttttgagacagggtcttgctctgtcacccaggctggtgtgcagtggcatgaacatggctcactgcagcctcgacctcctgggctcaagtgaccctcccgcctcagcctcctgagtagctaggactagaagtacatgccaccatgcccattaatttttgtattttttttgtagagacagggttttaccatgttgcccaggcttgtcttaaactcctgggctcaagtgatccacccactttgggctggcattataggcgtgggccaccatgcctggccttatgaattatttttcacatttacattagacagtctccagaattcatcatatcctggggtataaaataaatgttagtaatttattaaataaataaatgaaatatatgccccctgaccacagcagaattaaattagaaaccaataacaataagatagccagaaaaagctgcaaatctttgtaaattaaagtagcaggttctaaataattcatgggtctaaggagaaatcagaaggaaaattggaaaatagctttgaatggaaagaaaatacaatatattaaaatttgtgaaatgcagctacagcagtgcttagatgaaaatatgtggcttaaaagtgattgcagtagagaagaggaaaggtttaaagtcagtgatctaagtttcatgttaagaagctagaataataggagcaaattaaacccaaacaaaacaaataatgaaatattaaagagcagaggtcaatgttaacagttggttctttgaaaagattaatcaaattgatacactggctacgactgattaaactgattaagaataaaaagataaagtacaaattatcaatatcaggaataaaagagggcatgtcattctatggacattatgaggataatgaaggaaaaatttgaacaactgtgaacaacttggtgccaataaatttaccaacttagatgggatggtcatttgcttgacaatcacaacttaccaaaaatggacatgaaatggaaaatttgagtatccttttatttattaaagaagctacatcattattaataagttacctgcaaagcaaattccaggcccatatagaattttttttttttttttttttgagacctgagtgccaggtctcactctggcactcaggtggctggaatgcagtggcaggatcatagctcacttacagcattgaccgcctaggctcaagggatcctcccagctcaacctcctgagtaggtgggaccacaggcacatgcaaccacacccggcaaatttttgtattttttgtagagatgaggttttaccttgtttcctgggctggttttgaaatcctgagcttaagcaatccacccactgcagcctaccaaattgctgagattagaggtgtgggccactgcacccagcccctggtgaattctataaaatatttaaggaagaaatagcttcaatcttaaacaaaaactttaagaaaataaaggtagaataaacacttcccaataaggtttttgaagccagcataattctattactagggcctgagttgttacaagaaaagtaaatttgagtccaatttcatgaactcagaccaaaaggtatccttaacaaaaaattaataaaactgaaccaagcagtatgtaaaaggggaataaatcatgacccaggaaggttggttggtttagcatatggaaaaataatccatgcaagtcaccatattgaaattattcaatggaggcaaatctgtatgatcatctcagtatatgcagagaaaatatttgagagaataacattcatttatgataaaacctttcaggaaaccagagtagaagatgacatccacacaaaaaaattgcagccagctttattctcagtggtgaaaaaatgatgctttcccttatgactgtttgctaggcaaagatatccactatcatcacttacattcattcaaccagaaaagttgattctaaattttttatggaaaatcagaggacctagaattgctaaactatctcaaagaacaaagttggaggattcactgtctaatttcaagacttattataacactaaagtaatcaggacagtctggtaacagtagataaatgaatcagtgacatagaaggaacaaccatatgaatgaattttttaaatattgtgctgattaaaagaagctagacacaaaacagtacattccccatgattccatatgaagttcatcaatgtgcaatggggtcagaaatttgatcagtggttgtctacggcaatggggattgactggaaaaggggtacgacagaacttcctggaattatggaaatgttctctttcttgattgagatagtgtttacaagggtgtgcatattttcttaaaattcagaatggttacaccttggatctctgcattttcttgtatataaattttacctaaaaataaattaatttcagccttatggtggatttctctgttatattcctgttctgcattgaccaatgaataacataaatgtttctgccagaatttttttctaatagcttctgttggaataactgctctccttaactcctcctacactgggcctaaacccccatcatggcagttaaagaatcctattttgtttgatgattactggagtataggttacttgaagcaggggatgtctgttgatcattactgtttctctataatccctagctcagagcttttcatggatgattctcagagtttggggggaaaaaaggatatgtgtatatttaagaagtgtgtacattattttcagcaacagtactgtgaattttgtgcaggtcttaacgtattttaccatgcagtttaaaactacttaatatttgtgcaaaatgccatattcattgatttcaacgatatcacattctgtcagagcatattttacttcttccactataatcatgacattttaaataaccctggccaagccacttatatgctgatattagtttacttggtggagtcttcttctaagctatgtagacagggttaatattttgttatgtttacttacctggcaattagggtttgtttgtttacagtgtatacagaatctttctcgaggtaacacaggtgttgatcatttgcggatcatatattacctgcttttaacgtgaaagattccatctgtgcacattgaaatttttcttaggtaccttcagccatggtcttatgtttattctctagctgccatctgattatcaagtgtatcagtcatcagggtgcatgtcttacatggtccttggtggcagaggaaaagtaactttccagcctgggatctcaatgtggcaatgttttcttttctgctaaaatagacttgtgaagcatgaactaaaatttaaaaatatgttaccaagtaagttgctgtaacataactctagcaactggctaaattcagtgttatctgtttgcatctaaaacttttgcattaagtagaaacatattacataaatcataactttggtgaccatgttatcatgtaaatatctagttattgatcaataacgatgaccatttcttttgtaaatccatggatagagatctttcagtaaacacatcactcatgtgattattccttcagtatatgaaaaattcaaaattcattggaacattgaacaatgtagttggatagctctggatgttagactgagggcacagtgttcttggatgaggttgaaggggtttgagttatgcttttttaaggggaaaatgtttcactgtcctgtttatcattggaaagttccagctcggggggatgccatctctgggtaagtttattcatgatgctcagtgattagctgtagtgcttggcatttaacatacattcaggagatatttgctgggtaaatagctgagtaacagctcagagaaatcacaaggcttagctttccaagcaaacacaatacatcttcattagttagtgttttcaaagaatctattgattctaattgctaaccctttttattttccgtgaactaatgcaggaaaaaaagattttgagtttattttatagttatttgtgaaagaataccaacttgaagctatagaattttaaagaatacatcatcttaatatttataatattcctctgagctattcagaatgggctaacatggacatgatttgttaatcaatagcaaaagtgcaagccagaagacagagtggaaataaaacttaattggaattacagatacagttttttcatttcctttttttagtttaagacagtattggatattattagagaatttgctagaaagccccactgtactcaggatgacatttcagagattgtcagtgagccaatcttagtgtttcagaaagtatcaagattaactgtgactaaaaagtatgaggtggttattttgcttggaaccacagttttgacaacatgaagttgggaaaccagtaaggaagtgatagttgacctgtaccttaatgctttcatggcctgttgggaggataattgactaaatgagtatggtgtctgaaaacctttactgtgcctctcaaagtgaaaagtgtcttctcttagtagaattcagctcctcaagggctacaaaaacaattgcatgtttttaaaaaatacaatgtagtgtaataaacttcccttaactaggatagtttttccattacagcttgacttaaaatgaaaaccacagatcatatagatcttccagtgtaaggcattggcaactttttcatgtcatttgggttaaggaggaacaggaacataggggagaagggaaagaaacagagcacaaatgcgggatgcagttgttcactcctgtacaatttcttcaggaggagtgaggcttggggaaacctttgggatgcagagattgaaaaataaagagaaagcaactttcgatctatcatattcatcatagaaaatattttcaaaggatcaaatcctttaaaatcttgcagtcgaatatttttgctcctaatggttttttttaaaaatacctaccttcttgttatccaaatttttcctgtatgaaaagcttactagtgtatgttaaagaaacattaaataaaactttagtttggcacagtggtcaaaagaagcagtacaaatttaccctttacacatgaggtattttaactagtagtcagctattttaacagtaatgctcttagggagttttgatttagtaaggataggtgttgagaaaatcacaggatattccatttcctcctagcagttctgtgttatttaaatccagcttgcagttacccagcccagtgggtggtactgtgttgggcacctgtgctgggcacaattaggagtgacagctcccagccagccagctttgcttttgcttttgctttgttatttctgcagtgttttactgcatttaacagaggtgagggaataatacttccaaagggaacctctgaattctttaaacatgaagctaaggtaaattaatgcactttttaatgtgttctacagaattaattatcaagtaattattgaacagttaatatagcttgacttacaataaacatttattgtaggagccagacttcctggattttaactgtagttctgttgcatactaaccatgtatcttctttgtgcctcattgctttgtctataaagtggggataataatggcactcgcctcatagggttgttgtgaaatcatgggagtaaatgtttcctaactgttctgaacagtgcttggcacacggtaactggtgctacacattagctgttactattgctattagtattgttgttactaaacaattacatgtctatgctgagattgtgcattcaactagattttcacatatttggaacataatcatcacacctctggaactacgaaagagcagataacatgctaactcatgttatcagttcagagaggaggtcaatgatcgtgaagtgcaaaattctgtaacttaaggaagcagatatgagaggattattgtcgttagttacataggtgagagcagcaggattgctttaaaacaggaatgagagtgaatgtttagttcagtgaagaacctgtttggtttgttgtgaggcccctggccatctgatggaagagacagcaggcttgctcagctgagccatagcaggaggtctggccccaggaatgcaggatccaccattcacagagcttccatctctggaattgagaaggcttaacctgaggtgaaattggtgggattgttctttgttgacagctggcctaaccttgtcttttggaagtattcctctgcctttaaatggcctgctttggtaggcaggtgctggtactgctagctgtgccagaaaatagttcattttgtaactgtaagtttagaaaattttaaatctttagatgagtgatcatgatggtaaagaacatactaaagatttaaaaactcatgagagcttggcatgtctgcttgactgtgtgtttgtctggtgcgcttgcttgtccgtagaaggtaaatggcttttgccgtaaggtgtggaccttgggtgcttgttgttcatgtttaccctgggttttaaaaacatttagatccttggttctcagccacaactgcacattagcaccacctggagagcttttaataaaacaactccctgggcccagagtccagatcaattaatcaaaatccctggggaagggtggggcctggaaactggtgggttttaccagcctcctaggtgattctaatgtgaagccaggtttagaaaccctgacttaatttagaataatgagatctcttgtatcaataggagactacttgcttttctggggactgcctgccccagtgtatcacaatactctgtcattcatctaattcctgctttccttggatttagaggactggtagtcctactactgccttagtttagtttatgaagagccttctctttttgtctcatgttgaaatttttattagtaccacagcaaaacagcctcttatttatctttcctattctccagtctgcacatcgttagaggaatgtttttcttaagaaagaaattggttagttgtacctgctgaaaatttagttgggtgatacagccagaacaaacacgttacagtgaattgattgcgtggttaggagttcagggaggtgaaacattttttccgagcatcctctctgccttggtgaatgatttcacttaattcccccagcagtcttatgaaatagatactgtcacctgtgtgttaaaatgttaagtaacttggccgaaagcagtggcgcgtgcctgtaatcccagcactttgggaggccaaggtgggcggatcacaagatcaggagtttgagaccagcctggctgatattttgaaaccctgtttctactaaaaatacaaaaattagccaggcgtggtggcacgcacctgtagtcccagctactcaggaggctgaggtaggagaattgcttgaacccgggaggcggaggttgcagtgagccgagatcgcgccactacactccggcctgggcaacagagtgagactccatctaaaaaaataaataaataaataaaatggtgtaagtaacttgaccaggttcttgtggtttgtatgcccggagctgaagtgacacccacatccattcctgtgtcctctctgtcatataagctctgatcttgtgtattgcatttcttcaaagccatgaaaattattcatatcaaaatattttcatcgtgaaaggtaattaaaacaaaataagctttctcattttacttttagaagtattaggatacaaacgtataaaacatttttttattgactaatctctagaaagaagctttaatatgcttaaggattggcaggagggtacaaattccttttccacacgttagggcaacggaattgtacatttcggacccagactcttgcacagatttcaaaaggtgggaaggcctattctgtcttctgtagctcacttaagaaacacaggctaatatatatgtctgtattttccttttctttttgtcttctcttttctcttctcttctcttcccttgtctttttttctgtttaaaaaaaaacttgtaaaaatactgcatcctgggatttaatagcaagtagcagagtgcaaaatattatgtgagcatcttggacctgaaaatgattcagtttctacattcatttcagtgctttttgaagtattatctgctgcttttctatcttaattcatgatctttctttggaaagatcatgagaagtgtagataaatgaaacataaaggctttcacctttaggacttttaaaatttatttcctaatccagtatatttagggtctaccttgaaaaatcccttttaaataatgagcaatatagtataaacatgtctttgacacagctcagatggaagttttattgatttacagcaataaaacatacatttaaataacagattaaattataccagttaacatcttaaggggaagaggccagaagtacatatttttgtgagctgatctctgtagctctcatccgaggactcttccagaagagacggtccagttatatctagaataatgaatggtttggttggaaggaattactgagcaagtaaatttgcagagctaaatgacccagaagagttgttacctaagatattgtcatataaatccaaagcacagttattttctggttagttaatgtagaaagtttagatatacaggtgcttatgtgttatttcataaaatatgtactcaatgcctactgtgtgcaagttaactaaatgctatgttgaatacaaagttaaataatattaagcaattgattgggatagctaaataatgtattataatacaagatacaaagacataaattaaggttaaactgtgtgctctgtgggtgagcagaggcaggagtgactaaatattggtgtaattatcacaatccatggcctaaagcgtaagacacctccaataagatttaacactgcaggccaactgattcatttagccattcattcataaatagtttatttactttccatatcctggttaatttttctgtttccatgtgtagtttaagtttgtaatttgtagtaggaggtattcttactacccatgtaataatcatattttttcttctactggttttttaattaaaatgaaattgcttggaaaatagcagacttattttgtgagatttatctctggagcctttaaggctactatcagtttagcatagcttaaaaggtagaatagctttgaaaaatatattgagccaagtgacttccatgacttatgcatatcagtgtggtttgttatagaaatagaattggcctcctgagctctattgttaggaatctaccctagaacatacctagagaagttggattaacagaaaacattcaggtatcgtagatgcatggaagtttccatttgaaagacagcttaaattttatctaattcagcccctttggttcaaaaagatggaggccttagagatgttaggaaatcagtctggtgatcataatttggagagatctttgatatagatatactcattactatttttgttatttcttggagggagttaaaatgatattgttgtttgctattttgaattttgccagccattaagaatagatatttaaagagataacagttaacttacaacaacatgagcagatttttattaggattattgatttctgactccatctttttttttcctgtgggcccccattcctcagttaatgatgatgaacatgatgcttgatggcaaaatgaaataggaaaattgtaacaacaaaattataactaatgattcacaagtcagaaataactataaagaaacaaatttgggcacttattttaatgaaaagtgtgccttttaagcagatatcagaaagttttatcgtagccccattttatattgtaaaatacaaaattacatatgttagccttacataggaatggtgattatgatgttttgcttaatatatttgggttagaatgtgtatacataatgactgtagcttttgctcattctttttcaatgtaatttgtgggaaaggtagagaaataattagatttttctcattttttaattttcagtgcagcacaaaaatatccttttttcctagtgacagacacacacataaatgcacaaataattctggctaacttcacagtaagtattattgttgtcaacacaacacaaaagtatgtggtgagcacatgatggtaagagcaaattttacagtaaatgtggattttttttctttgcaggtacatgttgggacttgcagcagttccggcggttatacagttttttggctttctctttttgcctgaaagccctcgatggcttattcagaaaggacagactcagaaggcccgtagaattttatctcagatgcgtggtaaccagaccattgatgaggaatatgatagcatcaaaaacaacattgaagaggaggaaaaagaggttggctcaggtatatagactttatacttatatgaatttaaaaactatacagtggtcttatttgtcattattttgtgtgcgtgtgtgtataatatatttttaatatatgggtatttatgtataaatatggatatttatatttatacaaaaatatccatatataaaattatatatgtattattgaccttccatattcatttaaaagctattgaactgttttcaaaataatctttgtaaaaaattaaaatgcttcgtttacatgtgttacattaattttcatactaatttttataaagcgtatgagtacctcatgtactagtttagggataagtttgtgtttccctctttccattaaaatatttaattcattgtctattctgaaattcaccatgtcagaaaaccaagaaaagtctcatgttaatttatgttgatgaatttatttttgaagaagatttcacatagaaatgtaccaaacaattctgaggcaggatctataatcttgacagtctgatttgggtaagtgatttgtaggatgtaaacgaggaaaaggtagacatttcaagatacattttttcaacaataacaattagcctgctcacttcacatttcccaaattggtcttattttctcttgcgcttccttttgcctctacattgttagctcaaggggagaagcagatttgtattagtcaaattatttttcatacctgagaaaatgccaagcacacacactcctttgctgatacatgtctacacaggtgttagaaggtctgtccagtctactttctcctaccatttttggtggagctgaccattgttgccttcctgaaacaacaggatgaacactctgaagaagctggtctctgtgttagccacacgtggcttgatttaactttacctacctgtagcatgatagcatgatgctgtcactttgttgctgagatcaaagcctcaacaaactgtgagcccattctatgtgaagttcattttttttaacgctttttgagcatcagccaggtgtccagcaatgtcagcatttctagagtaacatattagtgcaaagattaaggagaattttgctttaacaaaaagttttacttttactgagttaaacatcgtgttccttaaaaaatatcttaaaatatctatttaaatgacaacttattttatgctcctgtctaaatttctcttctcagtaactcaaatgaaatatgaattttttttttttttttgagatgaagtctcactctgttgcccaggttggagtgcaatggcgcgatcttggctcactgcaacctccgcctcccgagttcaagtgattctcctgcctcggcctcccgagtagctgggattataggcatgggccatcatgcctggctgatttttgtattttttgtagagatggggtttcaccatgttggccaggctggtcttgaactcctgacctctggtgatctgcccaccttggcctcccaaagtactgggattacaggcgtgagccaccgcacctggccatgaatttgttttaattgtagtaattcatacatttgaaagttatgtacaaattatgtgtgagtggaaaaacttttcagagtaagagaaaaattgttaaatactatttagagcctgtatttttcttaatttatataaaggataaaaatttaatttttaaaagccttcttgtttagggatatggatatcattgattttattgcaaagcattaaggatatagcttcattttgactgcttaaaaatatgtctgactactctagccatgcagtgttgacggtgtatcctatttgagttttagacattattcggaatatataaccaaatgaatttttaaagaaatctggggtacatagggttgcaattatcaacatctgctttagtttttatcagaagtctttgggagctaaatagcacccctttgcttggatatagataaaataattccctattccccagttttgttttacattcacatttggcacaggtttttaaaaatactataatgttattcactggatcctaataacgtttgctcatgcttgagtaaatattctaaactttggaactaataggattattaacctatccatttctggatttgtattatttgaagtaatatcatcttgcttaatttaaaagctaatcttaacgttctttttaaaaagtacgcagttaagagcattattgcatgaatgcattcagacagatttgccagattacatggcaccagtgattgaggacctgattttttatgattaagaaacgtgaccacagtaaaacatggtctgcagaactgtgaattgtattatcagtattgtaatgtccaggagcaagactctgggtcagtttaattggaaaatagagagttaacaaactgacatggtcttgtccctccatcatgcttcattcaagaacgataggctagatggacaaatgcacataaaagaatggctaacttcaaagtaataaaaatgcactggcacagaaaagatgaatcagccattgtgttgaagggttagggaatggcctgttaatctgtccatggatcctgagaattttgatccacaacatcaagcctgggaactgtgggcaatagagtgcagctacctgaagggaaccttaatgtaggtaccacaaattatcctgatattccaggaatttagaaagacgttgtttaagacaccctatttcttataaggaggaatgtgttatcaaacatggtggcttagatacctgttcgcattgagcttactaataaataggtctgattctggatcagtaaaccatgtcttatctagcagttccccagtggatttgtgacttgtgacggttatggcacttgcatatgtgatccttctcttttcataggaatttttttttcttgttcacttgaatttaaacttgacctctgtgaggaaaataggcctagctactgaagtgtatattggctacattaatttattttttggatgtgtgagattgttagtgcctagagcatttttcttggtttaaaaccacactttatatagtagatatggcagttgctctggccatgtcagcagcaaagttgaggcttccaggccataccatggaataaggttggagtgcaatggaatctcatctcttctgcccatggcattgaggtcagactcatttgcatgacatccaatgtcttgtgtgtttttttccactatagttggcaaaacaacaacaaaaaggcagtatgggaaaagaagcaaacatttggttttcacgtgtgctcagcactgttgatacatcctgtaggaataataaagtaagactagcagaaacaacagcttggtttggagagctcgctggagtgggagacagggagatggaagaatatcactggctgtgtctcaaacttgccatcttaaatgaatctcgggagagttgccgcgcctcagtttctttttaggtttgtaagaaaagaaaaccagattataataactccaaggtctgtttttttaggattttgaaagtctctgagaagtgcctcctctttatttctaaatgctgtacagcagtatttctttcaaaagtatttattgagtgacatgcatcagaggtggggatgtggcagtaaataagactgacaagattctggtccattctcattggataaggcacacaataaatgaaagagcaattaactactagataactacaaattatggtaattgctttgaaaaagatgaagagaataataaaatgcttatagagggaatgaaaaggggtactttacatgggatggttaggaaagcctctctgaagagatgaacttgaagggtgaaaaggaatcagcaatacagagaactggagggaagactgttccagaaagaggaaacagcaaatgcaaaattctgttttattaagtgggccagattgatttttgcaagttttgatcatagctacaaagtgtacatgtaccagacttctaagatattgcagtaagaactaactatacatcttttatctcaggttcccaagcctaagtgttaaattagtagggacacaattactgttttcagaattgaaagcaaatttaaatacaaagaaacattaatatgatttccatcattttgtggtatgtctggtttgttttcctagtttatatcatattgcatagatgtgtaatagagtcatggcctgtattatcaacagatacagaatcctgatagagacataggtaattacttaagcaatgattggcaaacttttctgcttagcttcaaagttgagtgaagagaggcaggccctttggggcctggttattataacaggaagcagctgtggtaagctcaaatatatttgaatttttctgctttatcctagaaattaaccaaagtttgcattctgttctataatataactgttttacttgactgtaaaccgtttttttcctaaatagttccagttttcattcattggcttcatggaacccatcactctgtcatttatatccctgggatatgtatccctcagtttgacagacatgtcctgaaagagtttggagtttctctcctgggcaaattcattagagatgatattaaaagtagggtctgtccatgtcactagagatgagaagtcatttcttggattactgggcatatagaaggcatagagtctttgttaggagctttagttcctgaaagttaaaaattgtctctcatgacaaaggaagtaaaatcaaccaacagaagagacaggattcttctgaaggcagtcttagggaacaatccagaaatgagaggtgtgttttcatgtgctttatataaccttgtttgatagcacttatttgacttctttagtttcttatcctgtaccagcgaacaagtgtaccctgagaggagatgaaaggaaagcaaaggctgttgctgccatgacttgtcagaagaagccccctggccccgctgcaggagcccctcaagcacagtttctgggaggtcttagataaggcaccatctctgtcatcctcctctccactctgaagtgggcgtgctaaggcaggatcattggatgcttaaggcaggatcattgtgctaaggcaggatcattggaaggaaagcatgaacaacaaaagcatgaacaacaaaagctttctctagagaaacatacagatggtggtgttagaaccactgcaaaaagctagggaagctagggaaattaaaaagcagtatgtttagggagaatgaggttattaggacagcatcagtgcaatgacagattgagtaaaggaaggcaggcaagggagacactgactgcatgccttagggcagtaaagagcagccttttataaatctatttatagcatgggttcaatccaaggaacttaaaaatggtcatgggctttttttcccctaaaagaaaatggctttttttggggggggaggggtgaattccatgttaaaaaattacatattaaaacttttttttttttttgagacagtcttgtactgtcatgcaggctggagtgcagtggcacaattttggctctttgcaacctctgcctcctgggttcaagtgattcccctgcctcagcctccccagtagctgggactacaggcatgcaccactacgcccagctaattttttgtatgtctagtagagacggggtttcaccgcgttggccaggctggccttgaactcctgacctcaagtgatccacctgccttggcctcccaaagtgctaagattacaggcatgagccacaacacccggccttaaaaattgttttacagttaatattacctagatcatctagatcatgtactttcagaatggacttattaaacagaagaatgccagccagaatattggccctaccctttggtcagtaaaatctcaacatttaatcatataggagaagtagcaacccagaggcactagctaatgtttcagattggaattagatgcaggcccactagttgctagtcactgtagtagggcatttaggttacctgtgtgatatgtaatctatgtgaaaatatgcaagccagcaagatttccattatttaattttatcaacaaatgagtttaggaatctgggtgaacgttggctttgcctttgacaaagagtttgatctctagcctggaaagcaagagtattgtagggaagagaacttattcaggagcttcctgtgagttcattttaaaacatgatttgatttacctccagttccttgggggtcatgtctgtcatgtataggaagggacagctgcatctcttttttttttcctctagtaattttgcaatttggtcatgaagtcttacctaccttcgtaagtcattttctttttttgtgaattgatattgactgtggccctttcagcaaatcatattctgcagagaggtcagagggggtaaatatttatcgtattttgatagaaattcttctgtatgtttctttagaaatccaatttcagcataatgacactgcagtcaaatactcgttgcaattgacatctgctgcacttagaggaaaatagtcattctctctaatatatttggtagtttgcttttatttttttcatgtggtagtactacagtgttatctgacccaaaacaatgcatggatgtcatttactaggtgaactttaaatagatattgataaattgttcttggtaagatgacctgcaattttctaaatattggcaaagaaaacatttctatatccaatattctagaggtggttgtaaaattccaaaaattgtcaaagtattaggctggtaaacagtagattaaaacaaaaggtcagataaaaagctactttaattctcaatccttatgttaagctgtaagctgaaggactattaaaacaatacacaactctgttcagtttttagtaaaacttattttcttaggcatgctgacttacttaaaagaaacactatttcattcaatatggctttaaataaaggttgtcgtcgattttctaaaccccagacaacttttaaaatcttatgcagaattggaatcattcttggattttacattaaaatgtcattgactgttctgttgttatatggggataaagaacagcacagagattttccactgagcatactcacgggagaagaaaacatttttcagattacttgtaggcttttaagtcattttccttgatttatactgagaatccagattgtcttagtaagtagataggtaatacttcaaagctttatatttttgttttcttgctaagatgtacttaaatccatatctcataaaagaagatccatgcagaaagaattgtgactttgtcaaagatctcttttttcccacttaccgttaggttcatactatattttactgctctgtatttaatacgattaaatggaatgaaaaaaaaaaaacccacaaggtagacatttgaaaatgaatgtaattcatgagttgctgctcagggtagctcacttccaacttaacttgaaatccatcattcagtataggtgatagtctgcttcgtaaataaaaccatgatttggagacattttttcttcaagatacgacaaattgctatgccctttaaaggttacctgatctttgtagaaggttaccagaaggtcctgaagaaaacccttttttttttcccacctcaaaggggaaggcacaggagccattctttagtgttgggacattttagtttaacaagacaattccatggatagtctgtagaatcagaatatcaatggccatgtgtattagtctattttcacactgtgataactactcaagactgggtaatttataaagacaagaggtttaattgactcacaattctgcatggctgggaaggcctcaggaaattcagaatcatagtggaaggtgaaggggaagaaaggcacgtctcacatggccgcaggagagagagtgaagaaagtcacacagttttaaaccgtcagagctcgtgagaactcactcactatcatgagaacagcctgagggaactgcctccatgatctgatcacctctcaccaggtcccttccttgacacctggggtttacaactcaacgtgaaatttgggtggagacacagagccaaaccacatcaccatgtcatatactatctgaagaaacctgcctattctcaaatgtcagcagagatcttctcagagtttcttaaaaaatcaaagaaaccttattttttccctcatattttaaattggatttgtattggggagctacagtggtcaaatgccattaattttctcctcttacctgaggccctctaaaccctctggtactaagcagtatttttaatcagtatcttactgaataccttgctttagatgcacatttcagttaactcacttattaacacctattatttcttgaaacgttgagccttcaataaggaggtgtgtccttggcaggatacagtgaggagaaaattattaggtttatgaagccggaactataatcagttgctgtgtaagtgtctcacgtttttcagtacagtttttcccctggatttttcaaggtacttccttgaaaatgattcccactgcacatctcttagaataaaataaaccttcaagataattttttaagaaaactgagcccagtaactgttctttcctaaaggggaggggcaactagtgtgaaaatactagtaacaatttctttttcctgaatgcccatttctataaatgttacaagcacatctatagaaacacattctccctttctcttttcactctcattcttaaaacaatcctaaaacagacattataatccacgttgtactgggaaaatggagtgctggcaagggcaaacagctaggaagtgaaggaggcgggatctgggccccagctgctaccactccagcttctccctgttctgctctgcagactgcatctcatgccacatctgtgccatgcagtttggatgtaaatattaggaaaaaaaaaaaaattaggcattgtccttgctcttaaagagcttagaacctaacaatcaaatgtccttaagaatatccttttctgaaaggaaagcattcaaacaactataaaaaatgtgaaaaagccaatgaacttcaaaatcagttggcaaaatagttcagttgcttccaccttgagcctgtattcccaatctctcttctcttctcggttcttgctgccattgcctgggtgaggtctctggtgcttattctctctgccagagtaacagtgtcaactgtccttgtttctagtatcttccctctccatcctttccccatggcctccaaaattatcattgcaacacacagacaggatcatgtccctctcctcttcagaaacatgttccttaacttattattaaacttcctttacaatcttgtttgaatgtatctttccaggtttatttcagtagtgcccagactccatcatcataccaagagagcaagcaagaagcactcaacattactaagtgccttctgactctcagggtgaggagaaaatggtgtgggtgggatctgaggaggtaaggtggagcctggagacaccctgagattgttcacatcccctgaccttccctgtttaccccaatcagtgaaccctgcaaagaagatgcaattattgtctcgcaaaaagaattatattaaatttgaaaagcagtaacatattaggagttttctctgggcaaagaaggccttttgatattagtctccattagcaaaatttaagacaatttattgttcggttgacaaaaaggctgaactaaaagtgcttaagcatttcttcctgcttagtccaatagatgctggtattattttaattgtgttacacaagaatagaaagtctacaaattaggaaaaatcgtatttcatccacaagaaagaactattgagaaagtagaatggtgatcttttaattatactttgaatataagcatttggaggctgttctctgtgttgagggttaggtattaattttgatgcattatcctaggggttgtcaaactttttctgtaaagggccagatagtaatacttggctttttggccagtggtcttcactgtaactacttgtctctgctgttacagtacaaccatagaaaatgtattttaaaaaggagtgtggatttcttccagtaaagtgtgaagcttattattttgtgcttgttatgttttattatttataaaaacagaaagccggccagatttggcccatgagctataggttgctgattccttctttaaccattaagtatgtctgtttttatcagtttcctcagtttttattctttggactaatttgaggatgctattcacgttctttcctttcttttttctttctttctttttttttttttttttaaatatgtgcattgaagccacttcagtgtggtaattcctagtgggtttggcttctgtgcagaaggtaaagttgtcaatgtttgtgtccacgtgtaagtgtgcacagggtgtgtagtcacagaggaacctctaaagaagtattgcagggaagcctctgtataattgcagcaacagacttttatgagaccactgctcagagcacattgcttcttcaaggcccagccacagtcacttctgcatatgtcacagccccacaggtccatctcagcacatgatgtcacatttgatctaatggggcaccaaaagaggccaggtttctatggtgagagttgagtctgtcatcatctgagactggagccagctgtactatcaaaatggcttgatgcaccaacagaaatcttagctcccttgccttgaattgcagtcaaagcaagatgataccttttgtgaatgttaaaatgcaccaaacaattaaggagatggttttattcaggctcttgcaatagagagaagatgtattaatgaggaaatccttaaagaagagggagaaattctgggattttatacagcaggtaaacaaaggagtcagaaggaaggttggaagtaatcttatattggaatatgagagggcagagtgccttccttctctcgactccctggaaacctttgtgatatgtctctggagcagtcagcattagatttgcttccactagcaacttagccttacttatctttgtatcctcattgccagatacagtcattgcctgacgttagcaaggcacttcataaatgtttctttgactttctgtttacgtgagaggagtggatggtgatgtctgatctttgactcctgagatttggaggaggaaatggagctcttacagtgtgtagactccttccctctgtcctacttagtcatcatgagaccctggggaggtgtggttggtgaggagaagacataagtcagtgcacaatgactatttgttgaatgtctctatttacaaaggcagatgtatatgtttagaaactcgttgtggacttttagcaaaacagtttggaatttatgtgtatattaggagttattagtattttcttctagttgctaacatgttgggcccatcgaaaaaacttattttttgacatcaagtatttataagtacaatgaaatttcaaatatgaaagttataaaatctcatgtgatttattatcttagaattaattttgaaggagatccttgttactgtctgaatttaggaaataccccttactaattaatgagccaatttttatttataactctagacaatagattataattcagactaggcccttattataggtatgtacacttcaagatgtgatggaatttctctctactatgaaaggtgagcctatgaaattcaaatatattttcactagctatgactacagtggcttcagcacttttaagacaaatgattatcttgaccatagaattgtagtcagaatcttagatgtgaaatttggtgtttgttttgtttctgctactctcattagctagtttatatttatatacacccactttgagaagtaattggaaactcatggttctcaaaaatgttctgtgaaaaatattttaattttactttctgaaacagcttatcagggtttctgttcatttcacaagaattactgaaaacacaggtggcatcatttatgtaataattctgtagatttttctgtcttaagcttaataatggtcctgtggatattcagatttcaagagtagtttttttttgggggggtggtgtagtatgttttcaaattataagttctttattcttacatggaatcatggctgtagctgcataaccatgcaggtgacatttgtggcagcaaagaggaataatataatttaaagttttattactgttaaagagcaaagtttgaagagcaatcatgtgacttttctgattttatctgttagcagtttttttgaaaactaataaaagagcattattctttttttgaatatttacgatgtgtcatgtactgtgcgtggcacttcacatggtattattatatcttttaatgctacaacaatccagtgtgaaatcgttattattatcatcattattatattatactcttttagagatgagaaaaacctcaagtaaactgcatagatctccttggctactaagtggctaaattcagaattccaacccatctgcctttatattttgctggacaacagcaaaacgtctgctttcgtggatatacatgctgatgaaggaacacagacaataaaggaatatataacacaccaagaagcaatgagtgtgatggggaaagatcaagtgcagtggaggagggagagtgttggaagcctggggttagaaaggtgagtcatggcccttttgatgaggtgccctctgagactggaggaagtggtagtacatttccagaaaggaaacccagacatacatttgcctttagttttattcaaaaggaaaatttgtgctgagaagctctacctgccaagtgaattagtaagctactcaggtaaactggccagagacctaattattaacaggatcttgatgtcagaggcttgttctgataaggaattccattaggttcagcagtattttacaacaaaactatgttgaacaacttttagaaaggtgctttttcaacatcagaatcacctctgttattaagaaaaaagaaaggccacgaatataaattgcataggtctccttggctactaagtggccaattcagaattcaaacccatgttgaattccttggaattttttttttttcttcttaaatgggccagtgaaggttattgttctgatagtcttaagtactcagataagaataaattatagttattaactagtcatatataatgtgagaaatagaccctttaaaaattctttcacatacttcattacttgtaaaattataccagcaggaatagagacgtacctacaagatgtatatttaatttagtcttggagtttttacatattacttaattcagcggtcttagaaaattatttttcccaaagtgtagtcatttgcataaaacatttgttttctataataatctcaaataaaaattggctggatctaatatagcattacgatagaaatcttattttgaatatgaaggtgataattcaagaatatcttttggctggcgtggtggctcacgcctgtaatcccagtacttcggcaggctgaggtggatggatcactgagcttgggagtttaagaccagcctgaccaacataaagaaaccccgtcttgactaaaaatacaaaaaaatcagctgggcatggtggcatatgcctgtaatcccagctgcttgggaggctgaggcaggagaattgcttgaacctgggaggtggaggttgcagtgagccgagatcatgccatggcactccagcctgggcaacaagagtaaaactctgtctcaaaaaaaagaaaaaaaaatgaatatcttttataatctggactagtccaacacttaattttgaagtattcaagtggaatctttttatggaattcttaggtgaattttctctcaatttggggtctcagtgtaccaatctgctatgagttggaaaaccttcctcttttacaaaagggatagtttccttctgaggtaaatcagtggaagctagagatctccacaaatgttagagttttgtactttgtacttaattgacttaattagcatacagttgtacattagttgggtgagttttgtttacctctgggccagaaatacatattcatccattatttgacacatgtttctggggcttttactacttgcgcattattatactaaaagtaatgtggtgtacaaagtttttataaacaaaggcttttgtctccaggaacttttataatgtactagataagatcaggtactcaaataaggaagcaagaagttgatgctatataatgtttgagtatagatatgttccaaatacaaataacatatacatatatatgaaggcatttcctccttatttctcttgaaattatgtggcttcgttttagtatgagtctcatcagttacacaattgggcaagtgattcaacttttccccccaagtatttagtctcttcctctgtaaaatcaggtgctgaaggttgttccacatcctggtgagaagtgaatgggatgagggaaatacagtgcctgcgtagggccgcacacgtaagagctcattaaaagtggatttctcatcttttgtacattagtgaaataagctccaaaggaaattgtaatgattttcattatacaaaatatatatagtgtctgagtggcttaccattgtagatttagatagtggttcttgtgtcatatagtgggctcagcttttcagaaagacagatttgagttgtccaaggctatgtgccgttgggtgttacttaatatctagaaactaattgcctgggtttaaattgcagctgtgcaactttaggcaacttagttgacctctctgtgcttgtttcctcttctgtagcatggagatagttgtaatacctgtctcagataattatattttaaagattggatgatttaatatgtaaggctgtgagaacagtgcctggcacattataagctctgtaaaagtattcattcaataatatttttagacatgaaaagagggtggtaacaagatcccctgctcttaagagcataatccatccctttctcactgtattgtaaatttttgacctcacttagcctttgtagaaaatagtttatattactcaggttttttttttttaaatcattttgtaagaccacttgatgatttgactataccctttttgcacttggttttggaagccatcctctgcatgtatcttttgactatagaaactaaaaacatttttactgtagctgctactgcatattcctttactgtctccttatgtctgaagatcatataaatgtctttagcaggatttttcttaccaactcacttgaacttagaaactgaaagcacagagttagaagtggcatctcctgtcaaacattccctagcgaaaatttcttacagcattgtcattcagtcccggaggcctgctatctctgagtgctggagtgtgatttcctgtgtcactttcctttctgggaccataaaattggattccagacatttgttgggaagtttgcgatatgctgttttgaacattactgaaccaatataataacccactacttgtgttttggaagcagtgttatctgtgacagttattgctttgctgatttacatttggaagaatgttgaaaaagaaaaaggcagagcagtaaaaggtagaagcatgtatgtcctggtgatctttagcaggtaagaccagactgatgatattaagctagaatttaggttcatcatggtcacatccatgcgatagaaaaatatcacatcacatctttaagcaacacacattctgaccttctgtaataaattgtatatctcccttgatctttctggaaacacttccagtttctacacctggagtgaagacgcttgccaaatgacaagaataaattagagaattaatccagtgccaaagataatttttgagaaaagagtatctgtttccaaatggcaaaagaacatcattaatatcttctctagcattcaaagacaggagacagatgctactaataaaatataataaactcctcatggttgtttccaataaaacacaaatgattttgtagttctataattggaactgtcaatctaatttagtaggtttctgttgataaatttgatttcaaaaagttgagatgagaaactaattcactattatgtacaatatttcttgctaagtataaggaatattagcaaaaactgtagtaaaaattaggaagttgaactattaatacctcttggcttattgagatgcagcagatctttatgtgactgtcagtttagtggaaagagtgacaggaatcccaggttgtaactcctgctctgcctatcactaggtggctattgcagggctggcttcatggacacgcgacctctgcagctgcccagagccctgcactcagaagggtcctgcccttggtttaatcctcttctgtcactgtcttcagagttgtaatttttgagcacgggactcacattttcattttgccctcagccctacaaattaggcaaccacaactggctgttcacagcttacttctctgaatttcagagaaggcaaccaaaagattctggagctaggcatcgggtatacatggacataaagatgggaacagtagacgccgaggactactagagggaggagacggggagggaggaaggaaagggttgaaaaacgacctattgggtcctgtgctcactatttgggtgacaggatcatttatgcatgtttatgatgttaaggatcaaaccttagcatcacacaatatatctgtgtaacaaacctgcacatgtatcccctgaatctaaaataaaacttgaaggaaaagattcttgatagatctaagagtatgaaattctgtgagtcccaacaaagggaaggacccaagaaagtttattagaaactgaaagctcctgatccaccctcacttgttctcagtcaggaggaattttgccccctagtgggcatttagcaatgtctggaggcatttttgattgtcacagctcagggaatgtgatgttgacatctagtgggtagtaggatgtttaatgctacaaatacacagaacagcccctgcaacatagaactttttggcccaaaaagtcaacactcaacacaggtgatgttgataaaccctgcctaccgttattatttgtgtctccaactcttggtaccgggcgtgggaggttactcaaaagttagttgagcctctggctgtagcctggatcgtaggttgttgtattttttaccacatgaagactgaagaacgaagctggtgagtaggaagtgtaacttaacatttgcacgagatacactacacagatgctcttcttagggcctctacatctcacacttaccaaaccaactggtgggccccagactcttaaaacctctaaaacacaacacactcacagctggcagatgactttccaggacgccctggcacttgtgatgcggtctgttgggctgtttaccaagtcatttaggtttgtttctaaatctgtttatgccattgtgctggttgctgtaattaggcagtagaatcaactattacagaaatttaaagaaagaaaaatataaaaaaaggagagcaatttcagtgaaaacctaagttgaatgttttggaaagattcaataaagatgtcattaaagaaaactgctctcaaagtgtgggcaagatggttttaaaaggtttgtgaaaaaatcattaaaattagatggattctatattgaatttgcttaactgtcttaagttttcagtattatttatggagattgtagacaatacatttttttctgtggtttttgcaagaaaaacaatgctttagtcagctgatccaggctcagaaaaaaaaagccttacctacatcacaagatggaagaatgaatggcatttatatattttagggtgataaaattatttataaatgtaacctcagctgactttccctaataatcaatatttcagacaacagggcgtctattacctttattttccagtgggaaaaatatcaaatattctacttttctcacttgcagatccaaacaactctcagctcagtgatgtctctgaataatgttccttatttaacactaccttatatgttaagaagatattcatttgatttctgactccacaaacaccatcataagatctgtctcttgccagattcaatactgaaatgtttaagaactgtgcttccttttcagtgcatatgttttcttgagttgccatgtgcctgtatagattagcggcatctgggatttttaccacgtcacattcttttagaattgaagaagtataaatattaccagaattgtagtcaaataatttcaagttttttatagaaaatatgacaaataacctaatgtataaggaaacaaaagtttctgcaattccatcactgtttctaatagaaaattatgaatgagacattaattgtcagtctgcctcttcttcagatggcttttgacttagtattattttgttttaggacccatgtctctacattggactttagagcagagttctggcctcttatcttgagcttgttaaaagaaactgtcgccaggcatgatggctcatgcctgtaatcctagcacttttggggaggccaaagctcgaggattgcttgagctcaggagttcaagaccagcctgggcaacatagtgagaccttgtctctgtaaaagttttttaaaaaattggctgggtgtggtggcacatgcctgaagccccagatactcgggtggctgaagtgggacaattgcttgagcccagggagtcaaggctgtagtgagccatgaccattgccactgtactccagcctaggtgacagaataagacccagtctcaaaaaacaaaaacaaacaaacaaaaaaaccttaatgttctatttcctattaatagtcacaatattatagatattatctaacagtttaaagccataaacattctatttggctagtaaaatgttttcatcatttatgatcaaagatttcaggcatttttcttctttaattagtttaagttaacaataaataaattcagcctccctttggagggttagaacaggacagataaagctaaattcctctttgcccatcacatcgatcccacgcattttatacctctctgctccactgctggccataacagatttggggaatattcttccagacacacacacacaaacacacctagagaatttttatggtaatagtatcataatgcatgtattattaagttacttgtttgctttctttcaagttgagttgatttgagtcagatcttatataaatctagtccatccctttaaacttctctgtgatattccagatatggaatgtcacattctgtttatgtgttcttttattaataggcattacatttgggggtatcataaacagtgctgtaatgaacatccttgtatatgttttcttgagcacatgtatgtgtgtttctctagggtagatatctagaagtagaattgtgcacaaccatttatctcatggtgttatagtgttattttagttcatttgtttccatggtaatttctttctaagcttcaaagtatattggctggaagtcatcgaatcacaaccttttagaaatcaaagctcaggtatcatcttacaatatgaaggattagtttaattgtttctccatattctttttttttttttttggagtgacgcagtctcgctctgtcgcccaggctggagtgtagtggtgaaacctctgctcacagcgagctccgcctcctgggttcaagccattctcccacctcagcctctcgagtagctgggactacaggtgcccaccaccatgtctggctaatgttgtttttgtattttcagtagagacggggtttcatcatgttagccaggatggtctcgatctgttgacttcatgatccgcctgccttggccttccaaagtgctgggattacaggcatgagccactgtgcccagccaattgtttctccatactcttaacatttggtatcttgaccctggagcttcctgtcatcaccaccaccctgctgctttttatgccttagtaaaatctttttggcttctctgttctacttttattaacagaatttcagataagagaatgttgttataaggaatcattttagcaggtgtgttactatatttagtctaaaattttaaaaaatctggataggttttttaaaaaaaatccttaaatgttttgagatgctgattagttcagaattatacatatgttggtttaaactagttgaatcttttgatgctgtttaattacctcagactctacctcagaagtagaaagtgcttatattttaaatctgggttttcccgtaaaacccattgtatattataaaagtaatatagataaggcgtttttccatgtatggaatctttaaggctggtaaacgatatcttccttctttgaatagtgtttcttcctttgaataattatgctaccactcatatttaatggcttctatgtgtgaggtattgtgccatatttttttcttttaattcttacagcaagccaaataactaaaatgtgaactattatcattttatagttgtaaaaattgatagagaagttaacaatcttgcccaagtttaccctgttaggaaatagaagaactaagaattcaaaacaaagcttatcttattagaacagtatacactcttcaatgtactatataaggatacccttttccatcatcatttaaaaactatgtgagtctagttctgggattatgcttaattttaaaatagtaatgacctttttttaaaaaaaagttttaaagttgttttcagcagcaattgtaaataaaatagtttggtggacagtcaattaattttgtgtggcttttttttggatagcaaaaaagaacttatgaagttttagaatatttatactattcttgaactatttactgattcttctttcatatacttactagaccgtgtgcttaaaattttgaatctttaaaagtaatgcaagttttttatagaaaatatgacaaataacctaatgtataaggaaacaaaagtttctgcaattccatcactgtttctaatagaaaattatgaatgagttcccttctcgcagcatctatgtgcccacttcacattgggcacttctctcagccacagagcaaaggtgggaggggctcattagtttcaagaaattcttatactgggtcaactttagtaagaaagaaagaaacgaaagttgaacacacatgactgttagctaattaaaagatgtggctcatcttctttataaataaataaactgattagtgacccattgctggaaactggaagaatcagaagtaagtgtgcatctgctagcattacaaatactcaaatgggaatttctttatattattaatgattaaatttatgaaggaattaaaaatatgatcttggcagcagagagtatgaatttgttatgtgtatttgagatctgtctagccgacactgtagacatgggtttattcttgtaaaccactttttctccagagagacttgagtgaacaggtgggattgcttccattgataggaggataagggaagtgagtacaatgtttatatctaactgtacttgcttcctgcacttctgatatggagaccttcacctaaatctttactactgttattgtcttaatacctctttttctttgcttagactattagaaagaaattttacctgactcttagaatttattcattattttgttactatattttcattttaacataattttcttactaataagcttacatttaatgaacataaactatgtgccagttatggtggcaaatgctttacatgctttgttttgtttaatccttaccacatctctttgatagagattcatattattgactgttttctggaggagaagtggaggctaaggaaagaaaaataaaattaaccaaaatgttacagctgatagaagacagaggcaaatctcttgcccagatatacctgagatacaaagtcaagtattcttgccactctgttacagcttatacatttcaaaatttctttttggaaaaaaataatattgtattcttatgttttcccagtgagctcctgtaaacatttaggtttcattttaatcctgcgttattaatttcaattttgtattttgcctaagtattagctgactgtatggggttattaatttatactcatatggtgggaagttgagtatgtttagacttaaaacattcatgtactgtttttctttttcaaattttaaccctgtttgattgaaattattaaatcatctagaaatgtgattctcaaccttggctgatcattggaagaagcaaaaactgtgaaatcagattctctgaggtagggccttacgttggaagcttcttaattatacacatatgcagccaaggttgagaaccacggacttaaaatagcctttggtatccacgggggcttgattccaggatacccctcagataccaaaatctgtgattgctcaagtctctgatataaaatcgtatagccttttggtggcacactgccacttagtggattttagagcagtggttcctaattagcatgcatctgaatcagtggcaagagaccctattaaaacatagattactgggcttcatgcacagaaccctgaatcagtaggtctaacgggaggcctaagaatttgcatttctagcaagtttcaggtgatgccagtgctgcttttttggactgccctttgagaaccacttcagatttaggtatcactctttgagaaccactgatttaggatcttactttctgagttggtctcttaaacttccttttagtttaagtgatcaccatactccactacccaccagatacacacccacataccctttgtaagctatcattaagcattactaggagcctccagatgcctgcactaatactaaagggtagttgtacctctggatgagggatttgttgtggctcacctggggacacttcaaatgaacttcattcttcccttcctctattctgtgaagtataaagtacacagattagtttagaggtctcttcatactgtagctacaggcccctttttctttaactcttcaataattttgaaaaatctcaaaagtttaatgttttcacccctaatttctcttgctaatttgtttctagcaaaaatgtgtctttgtcagcagtgctggtaagtgattacagataaggtagggttaggcagtaccgatgaccctccaacaacatgggtttgaacttacaggtggattttcttcccccgccacctctgacacagcaagaccaacccctcctctgcctcctcttcctcatcctactcagtgtgaagacaataaggataaagacctgtacgataatccctcttctactcattgaatagaaaatatatttttctctcttatgattttcttaaaaactttttcttttttctagcttactttattgtaagaatacagtatatagtacatatgacttaaaaatatatattaatcaactgtttgtgttattgataaggctcccagttaacagtgggctattcgtagttaagcttttggggagccaaaagtgtttaaggtgccatcttgaaaaccagaggctagtaacatgatcttcgacattttagcctctagaactgtgaaaaaaaaaaaaaaatctgtcctttactcattgcccagtctgtgctacagtcattttttggtatccatgggggcttgattccaggatacgcctcagataccaaaatctgtgattgctcaagtctctgatataaaatggtacagtggccgggtatggtggctcatgcctgtaacaccagcactttgggaggctgaggtgggtggatcacctgaggtcaggagtttgagaccagcctgtctaacatggtgaaatcctgtctctactaaaaatacaaaattatccaggcatggtggcacattcctgtaatcgcagctacttgggaggttgaggcaggggaattgcttgaagccaggacatggaggttgcagtgagctgagattgcaccattgcactccagcctgggcaacaagagtgaaactccatctcaaataaaataaaataaaattgtatagtatttgcatataacctatgtacatcttcccatatacttgaaataatctctggattacttataaaaccgaatacagtgtaaatgttatgcaaatagttgttatactatctttttttaaatttgtattttgtatttttattttttgtgttttttgggaggaattttttgttttgttttgtttttgagatggagttttgctctcattgcccaggctggagtgcaatggcgcactctcggctcactgcaacctctgcctcctgggttctagcgattctccttcctcagcctcccaagtagctgagattaccggcgcccgtcaccacgcccagctaatttaaactttctgtgcttcggtgtcctcatctacagaaagggaataatactcccattttgtagaatttttgtgtgtggtattatatgagagaatgagaaaaaatgtctggtactttgtaataaattaaaaattcaatacatttctaaatgtattgaaaaaaaaaacccacgatgatacctcttgagtgtttcttctccttggagatgacttgcttttttatagaacaggggttaaggcatattaggggcctggcatgtcattagtcccttcagtaatacacgttgatagggaaccaacagatttagctaccccacgatatagcatatccaaggcttagatttatagattcaagaacatttaaaaatatttgtctatggggcacctctgacggttgagttttgttattgccatcagcgcccactcactttttggttaagtgttgtttttgtctctcctcttccttggtccttggagataatcgttataattttaataagctagcactgcattaaaaatgatatgcattgaaatttaagattctagttgttaaatagggtaattcatatactattctttttgaagtggaagttgaggctagcataattcataaactccttctcaataggtattgctttttaaaaaattaactttattcctgattatataactgttttaatttacatagttgtgttgggtgaactgtataaatgtccatatttacaggagtggttcccaaacatctctccctgtcccagtccattatgatggcattattattcaccaggggagagggtggttgtggagcacagagcagggcactgagccagtgaccaatacgcctagcgtgagggctcctttccagtgtacaaatcatggatgtaaattattaacccctagtttgctttttttggctaacaaaatatcattatgtcactggctgtcaaggagagtgaaaagcagctttatgaagttccttctcccattttttttttttaggggaatatacactatactcagccataccctagaaatcagagccccatacatgctaggcatttttgtaaccttagcctatgccatcatccatattaatgccttttaaaacttcctctgtgtctttaccttcctcagtggactttgaacccttcacggggatggattgtgtcatattattctcagagtctcaaggacctaagagagttcctagctcatgacatgtgctgagtagttttgctgcatgaaagaatttgaattgaagatcatttgttcctttttaaaagacttttagaggaaattccatgacctcattcattcatttcatgtttaatagtgcatattgcttacagattttatttattttgttgctttctgagcccatctttcagtctgttttcagttgtgataggcaattcattcattattctttgtatttgggatcaaggcattagagagatgtgtaatacagactttggagtcaaacagagctgggtgtgaattgggactttgccactttttaaatgttgttgttggatacattacttaacttcactattgtctcttcatttgtaaaatgagtatgaaaaagtacccactataggataattatgaggactgagtgaggcagtgcacacaaagttcttaggctggcgcataataagtgcccaatacaacaattttttattgtagttgacgtttagatagttggttttcaataagcatgtttttcttaaacctgattatttaaagtcatccaatgattcatttgttttccttaatttcagttgttagttggagaaatgtttacagcctagtgaaaatgtgtgcggtagaccagtaagatcacctacttaataaaatcatctatttgctaggttaaattttgctctgtattattaattatggaaattgattttcttgctttgaaactttattatgtttacccagttatttatcctagtgaaataaattatcaacgaaaatgctgcttctaaaattttcattgggatgattgataacttagaaatgtcatatttattgaagaaatagaattatttttattcagaacaaattcactttgtgattatgcacatttaattttatttatagacttttacatcccagtggtgctaagtgaagtgaattttgcaagatcatagtttcagtgccttgaatgtcattaagtcccaagaataaagagtgctgacttagatgtcagaagacttgcattctcattctgattccctcagttcttagtctgtgaccttgggcaagtcatttaactaccaagtttcattttctttatcttttcctgccttgtctacctcacagagtcattgggagagtgaaatgaaaaaatatttaagaatggtgaagactgtggaaattaaagatattatttttggtgtaaggcaatttttagaaaagataacagcatgtaggctaagacagtgaaaatacatccattcacctgactttttattccaaatcaatatcagaaatattcaagaagtgtctttaatgtcttttttatagctcactttgaaagaaaatttacaaattacagggtggcttgttatttgtgttcccctctccagtatgtgctgccagtttggattttggcaatgcagttttttgttgtcgttaaggcccactttgagtgaatgctaacatcagcagatagagttgaggaaactttctgaaaacagctaaacataccagtgcttatccattgagtgtgtgagtcaggagactcctgtttgcttggtcatgttgatgtttacatatgctaaaataatttctcctgagtgtccatgccctctcttatcatttctcctcttggtgaggacctggagcttttggacattggggaatgcattgcagcctgtgtgtggcactcattggccggccagctagccttttttagtgtttactgttccactgggattaagtagtgagtggggcttcatgtaataaattgtgtcccctacaaattcatatgttgaagtcctaacccccagttccttataatgtgactacatttggagatagagcctttagagatgattaaggttaaatgaggtcatatgagtaaacgctaatcactataactgcgattcttataagaagaggaagaggcaccagggatttgcacacacagaggaaagaacatgtcgggatactgcgggaaggtggctatctgcaagccaaggagagagaggcctccagaaaaaccaaacctgccaatgccatgatcttggactttgagcctctagaactgtgagaaagcaaatttctgtttaagccacccagtctgtggtactttgctatagcagccctggcaaaccattacatggagatcccaggtgcttggcactaccaggtgtatgtgtcggtcattaggactgtgaaaagcaccttaaaagacctgatgaccttaatgtaaattgagtttcagtttaaatttagtagagggtagaggttcacagattatatagcctgttacagcctgtaagtttttgggttttgttgctgttgttgttgttttttaatgtagagctaatggtttattagtccattttcatgctgctgataaagacatacctgagattgggcaatctacaaaagaaagatgtttaatagacttacagtaccacatagctggggaagcctcccaatcatggcagaaggcaaggagggtaagtcatggcttacatggatggcagcaggcaaagagagcttgtgcaggggagctcccatttttaaaaccgtcagatctcatgagacttatttatcgggagaaacaggccccaatatttcagtgtaggttctttctattttccataagtgccagctggctgagaaataaagagaaagagtacaaagagaggaattttacagctgggcctccaggggtgacatcacatattggtaggaccgtgatgcccacctgagccttaaagccagcaagttttattaaggatttcaaaaggggagggtgtacaagaacagggattagttcacaaagatcacatgcttcaaagggcaaaaaggagaacaaagatcacatgcttctgaggaaacagcaaagggcaaaaccagaaactcctgataagggtccaaaaaagatcacaagacaaagggcaaatgcaaagatcacaaggcaaagggcaaaagcagaattactgataatggtctatgttcagcggtgcacgtattgtcttgataaacaaacaacagaaaacagggtttgagagcagagaactggtctgacctcaaatttaccagggcaggtttttttcccaccctaattagcctgagggtattgcaggagaccagggcatatttcagtccttatctcaactgcataagacagacactcccagagcggctgtttgtagacctccccccatgaatgcattccttctccagggtattaattattaatattccttgctaagaaaagaatttagcgatatcttccatacttgcacgtccatttataggctctctgcaagaagaaaaatatggctctttttgcctgaccccgcgggcagtcagaccttatggttgtcttcccttgttccctaaaatcgctgttattctgttctttttcaaggtgcactgatttcatattgttcaaacacacatgttttacaatcaatttgtacagttaacacaattatcatagtggccctgaggtgacgtacatcctcagcttatgaagatgacaggattaagagattaaagtaagacaggcctaagaaattatgaaagtattatttgggaactggtaagtgtccatgaaatcttcacaatttatgttcctctgctgcggctccagctggtccctccattcggggtccctaacttcctgcaacacttatttactctcaggagaacagcatgggaaagacctgcccacatgattcagtgctctctcaccaggtctctcctacaacatgtgggaattcaagatgagatttgggtggggacacagccaagccatatcattctgcccctggcccctccaaaatctcatatcctcacatttcacaaccaatcatgctttcccaacagtcctccaaagtcttaactcatctcagcattaactcaaaagtctacagtccaaagtctcatcctagacaaaacaagttccttctgcctatgagcctgtaaaatcaaaagcaagttagttacttcctagatacaatgggtgtacaggcattgggtaaatacagccattccaaacgggagaaattggccaaaacaaaggggctacaggtctcacacaagtctgaaatgcagtgagacagccaaatatttaaagctccaaaatgatctcctttgactccatgtctcacatccaggtcatgctgatgcaaaaggtgggttcccacagccttgggcagctccacccttgtgacagactgttttattcctcacccccttcccacccttttccctcaagtccccaaagtccattgtttcattcttatgcctttgcatcctcataatttagctcccacttatgtgtgacagcatacgatgtttggttttccattcctgaatatttatttcacatagaataatagtttccagtctcctgcaggttgctgtgaatgccactaatttattcctttttatggctgagtagtattccattgtatacatatatatatacataccacaatttctttatccactcgctgattgatgggtgttagggttggttccacatttttgcagttgctaattgtgctgctgtaaatgtgcgtgtgcaagtatcttttttgtataataacttcttttcttctgggtatatatccagtagcgggattgttggatcaaatgatagttttacttttagttctttaaggaatctccacacggctttccatagtggttgtactagattacattccgaccagcagtggtgaagtgttccctgttcactgcatccccatcaacatctactattttttaattttttgattatggcaattcttttttttcgagatggagtctcgctctgtcacccaggctggagtgcagtggtgcgatctcggctcaccgcaaactccgcctcccaggttctcgccattctcctgactcagcctcccaagtaactgggactacaagcacccgccaccatgcccggataattttttgtattttttagtagagatggggtttcaccatgttagccaggatggtctcgatctcttgacctcgtgatctgcctgcctcggcctcccaaagtgctgagattacaggcgtgagccattatgcctggcctgattatggcaattcttgcaggagtaaggtggtatcacactatggttttgatttgcatttccctcatcattagtaatgttgagcatttttttcatatgtgtgttggccatttgtagatcttcttttgagaattgtcttaggtttaagtccttaatccatcttgagttgatttttgtataaggtgagagatgaggatccagtttcattctcttacacatggctagccaattatttcaggaccatttgttgaaaatggtgtcctttccccactttatgtttttgtttgctttgttgaaggtcagttggttgtaagtatttgggtttatttctgggttctctattctgttccattggtctatgtgcttatttttatactggtataatgctgttttggtgactgtggtcttctagtatagtttgagatcaggtagtgtgatgcctccagatttattctttttgcttagtcttgctttggctctgtgggctcttttttggttccatatgaattttagaattgttttttctaactctgtgaagaatgatggtggtattttgattggaattgcattgaatttgtaaattgcttttggcagtatggtcattatcacaatattgattctacccatccatgagcatgggatgtgtttccatttgtttgtgttttctatgatttctttcagcagtgttttatagttttccatgtagaggtttttcaccttcttggttaggtatattcctaagtattttaatttttttgcagctattgtaaaaggccaaaccccgatttttgacttctgtgcactggcaggctcaacacaatgtagaaggtgccaaggcttgaagattgcaccctctgaagccacggcccgaactctatgttggccccttccagccatggctgaagcagctggaatacagggcaccaagtggctaggctacacactgcatggggcggggggcccagcccacaaaaccactttttccttctaggcctgttggcctgtgatgagaggggctgctgtgaagacctctgacatgctctggagacattttccccattgtcttggggattaacatttggcttctcgttacttatgcaaatttctgcagctggcttggatttctcctcagaaaatgggattttcttttctaccacattgtcaggctgcaaattttccaaacttttatgctgtgcttccctgataaaactgaatgtctttaacagcacccaagtcacctcttgaatgctttgctgcttagaaatttcttccactagataccacaaatcatctctctcaagtttaaagttccacaaatctctagggcaggggcaaaatgctgccagtctctttgctaaaacataacaagagtcacctttactccattccgcaataagttcttcatctccatttgagaccacttcaacctgggtttcattgtctatattactatcagcattgtgggcaaagccattcaacaagtctctagagagttccaactggtatgttttcagcagcgccccactccaatgtactgtatttgttttcatgcttctgataaagacatacctgagactgggcaatttacaaaagaaagaggtttagtggacttacagttccatgtagctggggaagccgcacaatcatagcagaaggcagggaggagcaagtcatgtttttcacggatggtagcaggcaaagagcggcagcttgtgcagggaaactcccgtttttaaaactatcagatcttgtgagacttactcactatcacgagaacagcatggaaaatacctgccccccatgattcaatgacctctcaccaggtccctcccacaacacatgggaattcaagatgagatttgggtggggacacagccaaaccatatcagatgtcaaagctacatttggtatggaaaagacaaaaacaacaatatttgagatagtgcatttgtatgcctacttttatatctttaatagtttgatatgcttttttactcttaaaaatctggaggaattaatacatgtagctcaaaatctctttaagtgacatgcacatgttctcatatgggagctaaaggagtggacttcatggaggtagagagtagaatggtggttactggaggatgggaagggtagcggggaggggaaatgagaagaggtggaaggaataaagtgtagtgtttgatagcacagtagggaggttatagttaatggtaatttattttatattttgaaatagctagaagaaaagatttagaatgtacccaacacaaacaaatgataaatgtttaaggtgatggatatcctaatcaccctgatttggtcactacacattgtatgcatgtatcagaatactacacgtacccataaatatataccattattatgtatcaatagaaatctttttaaaaaagagacctgcacaacgtgtattatttttatagttttgtttgttttaaagcatcatgctttctcatactggttaactcagaccaagtattgttttgatgttaatattaatgacacagtctaatttatgtatgaattttggggaagaagacacttatccattaatgttttttagttggcttaattttgatgtttaagtattgagtcctgttgatatgcctgttcactgaagtgaccattttatagataagaaaattgtactatcttttcatacacagttctgtgctatttgttgttgcttgcacatgcactatctcatcctctcaaaaacctgtagaggttagcattactcccttaattttcagatgaggaagcgatttccagaaaagttaaggtactttctcagagtcacacagtaaattcatggatcccatatttcctgactctctagagctctttttctgtttattacgcccaggtagatgaaaagcccaagaactgagaagtgcatttgaaatgtgcataaaactatatgcacagatatgcttgtgtttgtgtgtgtttgtaatgtgagacagaatgtgcttcccttgtttcgagttctttgcctttctggttattatggtggtagtgatatgggtatgtttttttttccctttttctatcttttatgtatatgcacacacatatgtatgtacggcagtatcaaaatacagcttgaagtgtgagattagtttttttttgttttttttttttttgagatggagtctcgctctgttgcccaggctggggtacagtggcacaatctcggctcactgcaagctccgcctcccgggttcaagcgattctcctgcctcagcctgccgagtagctgggactacagtgcctgccaccacgcctggctaattttttgtgtttttagtagagatggggtttcactgtccaggatggtctcgatctcctgacctcgtgatccgtccacctcagcctcccgaagtgctgggattacaggcgtgagccaccgcgcccggcagagattagtttttatcatctgtaagttgataggatgggtacaacttctgactggaaaaagaagattgcaagatgtctacagttattacattttatttcagtggataccagaacctgtttcttaaagctaaatgatgagaatttttattattattattaaacaaatctgtgtatgtttcctttgctccttgcttttcaattagatttaaatgatatttaagtagataagaaacaaatacgtgtctgttttcttagaaagaatagtaaattcaatgttgtttggaaatatttgtaggcttttgaattttctccacccttttctacagatgaatgcaaagattttcctaatcattacataagaacataacacttttatatcaattaatggctcatgacctattaaataagcaataagtcttgcttgtatctcaattatgtttttcagtccaaaagagatgggactacatcaaaatcagtttctctggaaaaacatcacatgtaatcttcagtcttctaatgttgacaacagtttatgaaggatatgtgttagtattcagataactcttaagctagctcattgttctgcagtttttactgaatccctgtctttcacgtttcctagcaactggctcacacatggaagatgcaggagtaaagccatcagggatttgctctgcatctatctcttaaacagcatctgagaaatggtagccagactacattgtttcacttcatagtttccactaaaagcttgccttttatgtttattagcttctaaaataggattgccataaaagattagcattaaaaattgagtagtgatgataaaatatcaaagtcaaattattggaaatttttatcagtaatatttcttgaatagtcattgctatttatgtatatctaaaaatgtgatggttactgtgatacagagatgaaataaaacgttttatatttgagaattaaaatctttattacaatattattcctcttaaatgcataagtactttagaattgtaaaataagatgcatcttcagttttgttttccttaaaagaaaagagagcaataaactttaaatatattacatgtatatgtatgtatatgtaactgtactcatatctgtcaattttaaatatttaagtcagcaaattgaaaaatgctttgtgagctaagtgatagattttattttggttaaggaaaggaaaataacaaggacacagccccagtttttctgtgtgagaaaatggtagtaatttgattgtgtcaattttaacacatttggaaaatagaagctacaatatgaatttgtgcttttctgccttatattttcattgccatttaatctttctgtctaatcttggtggtcccaaatgtaaactataatgacatacacctgttaatactactactactaagaacatatatgttagtaaatatgagtactccaagcttgttgagctttttgggttataagaatcttaagtgatgtctctttcatttttaactgtcacggccattttccataattaaccctaggaaggggatgaaaaggaaggaaaacagtgacaggggaaagtggcaaaatagagcaagagaaaaatagaaagaaagatgaaaatgagtgaaagaaaatggctatgagctgtaaaaggtagagtggtagaattcagccaacctgctattgtctttctccctgccacctctgtggtagtaatattctgtttttctcttgcccagtattgagtttgcatatcatgctagcatctgtcaggggagaaatggtgtgatccatggaatattcagaatgaaaatagaataagggtagaaagcacaacgtaatcacttgggtcctcatgtgtgtgctctctttagaatataggctgcttaatcgcccctttgtcctctcctgctttggacccccacccattcacaatatcaattcagggcaaatgaaggcacctccctcactcctctcttctacccctacatcaggcatcgctgagcaaggtcacaggtaccaggggagctcagtggtggtattttggataaagctgtaatccctgctacaattgctgtttctctctcctttgtaaatcagctttggggcaatggtagcatgcatcttactgagatcttaagcataattgcaatcaaagaagaggaacaaggatgcctgcagaacattcaggctcaccaaatcaggatgtgtgagctataagggcaggatgggtgagctataaaagcttttgattttacatcagaaacaaaataactcaactaccatcaccgtttcatttttttttaaaaagatagtagaatataatcttgaaatgaaggacaatactttcaaacaaagaatattaggcaacttcatactgacacacaagaaaaaataataggatggtgagtgggacatatttttattgccctgaattgatgctgtggatgggtgggggtccaaagcagcagaggacaaaggggctggtaagtagcctgtattctaaagagagcacccatgtgggaagagaggggtcttcctcacatcccaaaccaaccaatacagatcaagaaaatcattggtaaacatgagagggacctgcttgactgggagaggctaacatcccattgcctagctagacatgcacttatgaggcgtccttgctaatctgcctcctgtgtctacttaagtaggaacactggagcatgatggcagcaggggagtggggtgaacacggaagatgatgggagcagagcactggagtggcctgaaaaactatcatgtggtagggctacgatgtcacttggagcccatttgagatgaaggaaaaagctttaacccagatataagattgaagttttaaagcaaatggacttacacaaattgaggaaaaggatttgagaactctgctatctatgagaaactgtgggcagttctacaaagcactgctgtgtgaagtaagtagagaaaaacacagtctttcatggttgaactccgtgaagttaagactgtataaggaacaagataactgtctgcaaatcagaggaaacttctctgtggaccagtacaggctcacagattgatttttaggaaagacctaatctggtccaagccttcactttacaggaggaaaatcagtgtttggcacacacttcagggggagagagagagctccgttgatgaaaaaaggagacttgaaccttgaagcctaggtttgagaatcgaatacaattgagactaatttgagtatgtgtttgtgtgagtttggaggtttgaaaagctctgattagagcttttgttgtagagagagttggcattgcttaaagtttctaaactgtgatcatataatgcatacataaagtatggatattaatatattgaagtgtcccaagcacagctgccactagggggcaatggaggccccccacagtgtcacaaccacctagtcgtagccctagaaccagggttgcaagaaaatccctttgcctgcttttgccctgtttccttcagcactgttcagcactatgggtgaatagagcacccattccccagattttgtgcttccctggtgtgtgctgagatactatccccagaatacagtacagccagaaatccaagtgtgggcacatccttcttgtacttttgataatgttgttaagtagaagaactcttactcagaggagaatgcactgctggaacatgtgttagaagttaaagtccacactccccatgtaaaatatgtatttatctctcatgtgaatgttattcattcaatcattgagcatttattgagtactctgtgtgcttggccctcttctgtcctcagggatattgtgaagagatagagacattcctgctctgttagaaggaactcactttccagtgggaggaagatgagaaataaagaagtaaataaatatgtgtaagactactttatataataaaaggaactaatatttgatcgttatgactccagaatacatggccataggtgttactagagtagacatagaacaatagaactgtatataaaaggaaggagtcctagacttggaataatattttctcctcactggcttcctgttaaaaattagagctatagtcctatcagagaaaactccaggagaataaaattgtgattttgtggccaaaaaacccaagtgtggatgcaaccataaaccgatcactaagaacacatttacattatttaggagcttgatgtattttacagtaatttctcatctgtaaaatttcctgacagcagtggcaattttctttttgtttacccaaaccttgatcctcttctggatcatggggattaatttctttactggggattctctcaactagaacattaaaagtctgcttccctacagtgtattcttatgcaagactttgtggaaaaaaagttgtgcatatggcgatgatatttttagccctttccatgtcagtcaagcctgaatcttcttttaagacctagtttcagtgtcattggttgtgtgtgtcttcttccctggcattctccataacccagccagagcaagacatccatttttgattattcattcactcagaaaatgaatacctgttacatgccaggcaccattgggggcactgaagatttggcagtgatgaatgaaaggaagcctgccttaaagttttatttctagtggggaggggtgaccaaggaacacataaacatatgaaggtggtaataaatgttaacagataatggtgataaaaggtaaaatttaatgagcagattgataaaggatggttgaggatattgaggcaagagggttgcacctttttataggttggtccaggaaagtcagagaggtggcatgtattcaaaagactaaaatacgtgaggagagtgagccatgtggctatctgagtctgtgtgggtaaagcagaattggcatggagagtttcagggggtaagggcagaagaccagattatgtagggactgtgaggatttaggcttttattcaagaatgagaagggaagccactgaagggttatgagtagaggactgacacagcagacttaggtttacaaaggctcatctggctcctgcgctcagagtacatggagtgagacaatggtggaatctggccccttaaattggaggctgttggaataatttgggaaagagatgctggtggcctaggcctaggtgattgctatgggggttgtgagaggaggcgacgtatagagttaacaatatttactgatgcattggatggggatattagaagaagaggaatgaaagatgactcaaaggtttttgacttatatatgataaaaatcttaagctttggtcataagctatgaatttaacaacttggtttcctctttagcagcattttcctcccccccttccttccttccttccttccttccttccttccttcctccctccctcccttcttccctccctccctccctccttccttttctccctctcctccccctcctcctccttcccctcctcctcctagtcttcttcttcttcctctttttttcattcattctttttctctttctttctttcctttgttttcttttttctttcttctttctttctttcgttcattctttctttctttttctccttccttccttcctctttttttaaatataaaaacaggcaagtttcatgaaagataactcacacaataagtaacatatctgactaatagatatatgaaaagatctttattttccaccagttaaagtaatataaattaaaacaatgcaataatttttttcaacaattatgttgttgatgattagaatattgataataccaatgtgccaaagtatgaaaaaatgattactcttttacacattattacttggtggcagcttatattggtacaacattttaaagtggcaatttagcactgttaaaaataagacatttacaaaactttcggcccagcatttttgcatctgggaatctatttaaaaaaaactgtccctacatatatgcaaagatatgtacatctagaagattgttccttgcaatattgtttgtagtcgcgaaaaactggaaaccatctaaacatttatcaataggggatttactaagttcagaccaaggcaaagaattaatagtgatgattttcacgggtagaattggagggtcagtgggggatttcactctttttcttgtgtgcctttattttaatgttttactatattaaacagtacttttacagtaagaaaaatatttcaaaagttatttttagaaaaagcctcaaaattattttgatagaataataatacaaaataagcactcacaagtatatgacagcattatattaaaaagattaaactgtagtaataaaggataatcccaggaatccgatgatgctttattacaagaaaatatatttgtaatttatcaaaaagtgaaaaaaaataaatttgacctttggcagcttttcaagtaaccttttggttttaagaaaaaacagtgtataaatgtataaagatcatggtctcaggtaccttctacatgctgttgattactaaattcatagctgtttgaatatctcaaaggatgcagtagctattaattgagaaggactgtgagagaaacaggttattgttattattttggggaagggagtcaggagtttgcttttgacacatttcatttgagatgtcttttagacatccagctgaagaaattgagtagacagttggtgagcaagttttcggttcaagagacagggcaaatttggagatatgaatttgggaatcagcagtgtatagatgtatcatgatttttatacatgtgtcagttgcagcacttacctcattattttgtcattgtttgttgacatatttgtctgtctacattaaaatccttgggggcagagaccacatcttgtttgacattttaatatttcattcatggcaatcttgccatgatgtgaagctataggtttgttttctttggatatgattgactggagctatgattaacttaggctttgtccagggaaagccatttttcttaaaactaaaaggttatagcttaaaggcagccaaaggggaaaccaggttgttaaatttatagtttatgatcaaagcttaagatttttattatctctaggtatttaaatcttgccctcaattgctgatatccttgtgtctctaggaaataacatgccttttgatggctcaactcagtacacagtcataatctaggcacaaatggcagctttaaccaagaccaggcttgttgccttcgaggaaataaacttcatgccaactcagactgttggcaagcaccatagatatgcctgagatttgttctctttgaaattggtcggtttgatcagtgtggtctacagactgatttctgtccataaacaccctccctctttttttttttgtctgctaagatacatttaaaaaatctttttttttttggtctgcttaaatacaggttaaatacagaaaaagagagtaggcatatagaaagttttatagcaatcagtcaccgtaattttatgtctattgaatttagttttcaaaattgtattttgtgtgccttttttcattttttttcagtaattcatttcgttgtatttaacaaaagtatcaatctgcaacagattgaacttaaaaaacattggtccttcctccatagtttgagaaaccatgcactagttcatatcacgaagcacctcatagattgagagctcagataaatcagtggcgacgaggtgggtgaacgtgtagtaaacaggcatggatcagtatctccagaatatgtgtatgctttgaaaataattctgcaatggtccaaatgtttgtgtccctactccccaccccaattcatatattgaaatcctaaccccaaggttaggccccatctcccgatgaccccatctcctaatataaatcctcacctggaggttaggatttatattaggatatggggcctttgggaggtgattaggtcatggtggaaccctcacaattggaaccaaggcctttattttaaaagcctgagagagatctctcccctcccgtcatgtgaggacacagtgatgtgctgcctgaaccaagacacaggccctcaccgcacagtgaatcttctggagccttgatcttggatttcccagcctccagaatggtgagaaataaacatttattgtatataaacccctaagtttatggcactattatagcagctgaaatggactaagacaaattctttactccatttttcgtatcatgacttattgaaggaggtatgatatggtagcatgaaaagaggtaaagaaccaccctactgcagagaacagaaaaggtttggagtttgatttttgttgattaagctgcctgtgatctcaagtctggcatttaatgggcagactataaggtatgtgaccactgctggattttgtaaacatttcattttagcattcaagctttagatgtgtctttctgtatcagtacattgttttatgctttcctaaaagcagccttcttgtctacaacctctccatgcactgaattcctatgcactgaattcctaactttattttttagctcctggaacacttttatacctttcatttctcttttgatacttcaagcagaagctatttagagacacactgtgaataaatcattttagtcagttccttaatacttttcttaaccattattacctcctatgaataattttatttcacttttattaaataagcagaggtaatctgcatcagagaatgcaaataatggctaacttggtaattttaggaaagagaaacaggcagatataggcataacagtaaagggaagctaaaagaattctaacaaactaacaccaagaaaccaacagcaggaggagtagaaaacagagcactgggaagagagacaaaattgcgataatcatgatttcctcgagacagtgtttggagatggtttccctttgtttttcattttttgtaattttccagattgtgaacattaaccatgtattactattattatagttaaaaattgtttgcatatatccctcccccatatgtgtgagtaacttaagtataggtaacagaagcaaactggtgggtttggtattctagttatgatattctcgcttttatggggcataaaaatcattgtcagattcttccttcttggtgatttccccagtggcctcccatagattgcttcttcgtctttgtaaagatatatgacagcaaatctctaccagttaatgagcacgtgaaaagctatctatctaagggctgtgtgttttgctacttacaaagccgtaaagatgttgacaaaaatatctgaatccctgtaggatattctccatttttcatcaagacggacattagcctcttaaaaaaattaactgagagaaactgttgactaccttttaagtaacatcatcaaagaagtaaatggctttgattttttttaaaaagcagtttttagaaattatgaatggaatatattcactggatattagtaatccagaacttctgcattaaaccttcataattaattgtagtaatgcttttctaaaaatttactttgtctattgtatattacacaatattgtaatctagttttggtaccaggaatttacacttaaattgggtaaaaacaaaagttaaatgaaaaacatttaactttttaaagttatttttatttccgtctcttttattaaattctttgtttatagaagattgcacttaccgttgctctgttctcatattttataagcacttttttttttattatactttaagttttagggtacatgtgcacattgtgcaggttagttacatatgtatacatgtgctgtgctggtgcactgcacccactaactcgtcatctagcattaggtatatctcccaatgctatccctcccccctgcccccaccccaccacagtccccagattgtgatattccccttcctgtgtccatgtgatctcattgttcagttcccacctatgagtgagaatatgtggtgtttggttttttcttcttgcgatagtttactgagaatgatggtttccaatttcatccatgtccctacaaaggacatgaactcatccttttttatggctgcatagtattccatggtgtatatgtgccacattttcttaatccagtctatgattgttggacatttgggttggttccaagtctttgctattgtgaataatgccgcaataaacatacgtgtgcatgtgtctttatagcagcatgatttatagtcatttgggtatatacccagtaatgggattgctgggtcaaatggtatttctagttctagatccctgaggaatcgccacactgacttccacaatggttgaactagtttacagtcccaccaacagtgtaaaagtgttcctatttctccacatcctctccagcacctgttgtttcctgactttttaatgattgccattctaactggtgtgagatgatatctcatagtggttttgatttgcatttctctgatggccagtgatgatgagcattttttcatgtgttttttggctgcataaatgtcttcttttgagaagtgtctgttcatgtcctttgcccactttttgatggggttgtttctttttttcttgtaaatttgtttgagttcattgtagattctggatattagccctttgtcagatgagtaggttgcgaaaattttctcccatgttgtaggttgtctgttcactctgatggtagtttcttttgctgtgcagaagctctttagtttaattagatcccatttgtcaattttggcttttgttgccattgcttttggtgttttggacatgaagtccttgcccacgcctatgtcctgaatggtaatgcctaggttttcttctagggtttttatggttttaggtctaatgtttaaatctttaatccatcttgaattgagttttgtataaggtgtaaggaagggatccagtttcagctttctacatatggctagccagttttcccagcaccatttattaaataggggatcctttccccattgcttgtttttctcaggtttgtcaaagatcagatagttgtaggtatgcggcgttatttctgagggctctgttctgttccattgatctatatctctgttttggtaccagtaccatgctgttttggttactgtagtcttgtagtatagtttgaagtcaggtagtgtgatgcctccagctttgttcttttggcttaggattgacttggcaatgcgggctcttttttggttccatatgaactttaaagtagttttttccaattctgtgaagaaagtcattggtagcttgatggggatggcactgaatctgtaaattaccttgggcagtatggccattttcacgatattgattcttcctacccatgagcatggaatgttcttccatttgtttgtatcctcttttatttccttgagcagtggtttgtagttctccttgaagaggtgcttcacatcccttgtaagttggattcctaggtattttattctctttgaagcagttgtgaatgggagttcactcatgatttggctctctgtttgtctgttgttggtgtataagaatgcttgtgatttttgtactttgattttgtatcctgagactttgctgaagttgcttatcagcttaaggagattttgggctgagacgatggggttttctaggtaaacaatcatgtcgtctgcaaacagggacaatttgacttcctcttttcctaattgaataccctttatttccttctcctgcctgattgccctggccagaacttccaacactatgttgaataggagtggtgagagagggcatccctgtcttgtgccagttttcaaagggaatgcttccagtttttgcccattcagtatgatattggctgtgggtttgtcatagatagctcttattattttgaaatacgtcccatcaatacctaatttattgagagtttttagcatgaagggttgttgaattttgtcaaaggctttttctgcatctattgagataatcatgtggtttttgtctttggctctgtttatatgctggattacatttattgatttgcgtatattgaaccagccttgcatcccagggatgaagcccacttgatcatggtggataagctttttgatgtgctgctggattcggtttgccagtattttattgaggatttttgcatcaatgttcatcaaagatattggtctaaaattctcttttttggttgtgtctctgcccggctttggtatcagaatgatgctggcctcataaaatgagttagggaggattccctctttttctattgattggaatagtttcagaaggaatggtaccagttcctccttgtacctctggtagaattcggctgtgaatccatctggtcctggactctttttggtgggtaagctattgattattgccacaatttcagctcctgttattggtgtattcagagattcaacttcttcctggtttagtcttgggagagtgtatgtgtcgaggaatgtatccatttcttctagattttctagtttatttgcgtagaggtgtttgtagtattctctgatggtagtttgtatttctgtgggatcggtggtgatatcccctttatcattttttattgtgtccatttgattcttctctctttttttctttattagtcttgctagcggtctatcaattttgttgatcctttcaaaaaaccagctcctggattcattgattttttgaagggtttttgtgtgtctctatttccttcagttctgctctgattttagttatttcttgccttctgctagcttttgaatgtgtttgctcttgcttttctagttcttttcattgtgatgttagggtgtcaattttggatctttcctgctttctcttgtgggcatttagtgctataaatttccctctacacactgctttgaatgcatcccagagattctgatatgttgtgtctttgttctcgttggtttcaaagaacatctttatttctgccttcatttcgttatgtacccagtagtcattcaggagcaggctgttcagtttccatgtagttgagcggctttgagtgagattcttaatcctgagttctagtttgattgcactgtggtctgagagatagtttgttataatttctgttcttttacatttgctgaggagagctttccttccaactatgtggtcaattttggaataggtgtggtgtggtgctgaaaaaaatgtatattctgttgatttggggtggagagttctgtagatgtctgttaggtccgcttggtgcagagctgagttcaattcctgggtatccttgttgactttctgtctcgttgatctgtctaatgttgatagtggggtgttaaagtctcccattattattgtgtgggagtctaagtctctttgtaggtcactcaggacttgctttatgaatctgggtgctcctgtattgggtgcatatatatttaggatagttagctcctcttgttgaattgatccctttaccattatgtaatggccttctttgtctcttttgatctttgttggtttaaagtctgctttatcagagactaggattgcaacccctgcctttttttgttttccatttgcttggtagatcttcctccatccttttattttgagcctatgtgtgtctctgcacatgagatgggtttcctgaatacagcacactgatgggtcttgactctttatccaacttgccagtctgtgtcttttaattggagaatatagtccatttacatttaaagttaatattgttatgtgtgaatttgatcctgtcattatgatgttaactggtgattttgcttgttagttgatgcagtttcttcctagtctcgatggtctttacattttggcatgattttgcagtggctggtactggttgttcctttccatgtttagcgcttccttcaggagctcttttagggcaggcctggtggtgacaaaatctctcagcatttgcttgtctataaagtattttatttctccttcacttatgaagctttgtttggctggatatgaaattctgggttgaaaattcttttctttaagaatgttgaatattggccctcactctcttctggcttgtagggtttctgccgagagatccgctgttagtctgatgggcttccctttgagggtaacccgacctttctctctggctgcccttaacattttttccttcatttcaactttggtgaatctgacaattatgtgtcttggagttgctcttctcgaggagtatctttgtggcattctctgtatttcctgaatctgaacgttggcctgccttgctagattggggaagttctcctggataatatcctgcagagtgttttccaacttggttccattctccgcatcactttcaggtacaccaatcagacgtagatttggtcttttcacatagtcccatatttcttggaggctttgctcatttctttttattcttttttctctaaacttcccttctcgcttcatttcattcatttcatcttccgttgctgataccctttcttccagttgatcgcatcggctcctgaggcttctgcattcttcacgtagttctcgagccttggctttcagctccatcagctcctttaagcacttctctgtattggttattctagttatacattcttataaatttttttcaaagttttcaacttctttgcctttggtttgaatgtcctcccgtagctcagagtaatttgatcgtctgaagccttcttctctcagctcatcaaaatcattctccatccagctttgttccgttgctggtgaggaactgcgttcctttggaggaggagaggcgctctgcgttttagagtttccagtttttctgttctgttttttccccatctgtgtggttttatctacttttggtctttgatgatggtgatgtacagatgggtttttggtgtggatgtcctttctgtttgttagtttcccttctaacagacaggaccctcagctgcaggtctgttggaataccctgccatgtgaggtgtcagtgtgccgctgctggggggtgcctcccagttaggctgctcgggggtcaggggtcagggacccacttgaggaggcagtctgcccgttctcagatctccagctgcgtgctgggagaaccactgctctcttcaaagctgtcagacagggacatttaagtctgcagaggttactgctgtctttttgtttgtctgtgccctgcccccagaggtggagcctacagaggcaggcaggcctccttgagctgtggtgggctccacccagttcgagcttccaggctgctttgtttacctaagcaagcctgggcaatggcgggcgcctctcccccagccttgctgccgccttgcagtttgatctcagactgctgtgctagcaatccgcgagattccgtgggcgtaggaccctccgagccaggtgtgggatattgtcgcgtggtgcgccgttttttaagccagtctgaaaagcgccatattcgggtgggagtgacccgattttccaggtgcatccgtcacccctttctttgactccgaaagggaactccctgaccccttgcgcttcccaggtgaggcaatgcctcgccctgcttcggctcgcgcacggtgcgcgcacccactggcctgcgcccactgtctggcactccccagtgtgatgaactcggtacctcagatgtaaatgcagaaatcacccgtcttctgcatcgcttacgctgggagctgtagactggagctgttcctattcggccatcttggctcgagagtcaagcactttgttaaagagatagtgtgactctaaagtacaagttggtttcttcaccaattaagagttcttccatttgggggagatggactgtatttttgtgatgctgccatttgttgctcagaaaacttctatttttattagaattgccttgagagccaatttttgagccataaaacgtttcattcactcactcaacaaaaatgtattgaaggcttacttctatcagttctctctagatgccagatatactgcagtgagaaagctacatggttactgagctcacagagcttacagtgtggtgggggagacattaatgaaaacacacacgtgaaatacacaggcctctgaagaaaaattatcataaagataataatttagataggagggaaatgggcatttaggggaggcatctctggtaatgccagagaaagggtgaagaccatgagccaaggccctggattgagccacaacttggcacaactcattaatttataggaatctcttctttttgatctcaaatgctttcactcaactgaataagccattttagcaataatgcttgcctctggattactgccaaaagctaccttgattagcagagagtgaagatttgtgaccactgaggatattcggagtgtgtcactggctctgaagatatttctaaaagattttcagttatattttgagctgtagcaacatcaaggaaataattttgtaacctccctcccaagatgactttgaaggaaacgtatttataaattctgatgtgttttttcagccacattatttaataaccgttcttgatgtaatgagaaaaagactgtgcctcttttcagagaagctcagtctactgctttcttttccttcttgagaaagtgaacactgagacaaaataatctctgcaacaacgaaggaagttctgtttgactcagttgctaattcaatggctgaaagagatcagagacacagtttgatatgtgggaacattagaaactttgaggggtttggggttagataaacattgaccttaccactcactagctccttgatctttgaaaagttactgagcctctttgagcctttgtttgctaatctgcccaatgggattaatactacaaacctcttagggagcactgcagattaatctatatagagcttgaatctagtaggaactgaataaacatgagctcatgcctaccttcctctttccaaacccctcatccttttatctgttaccatagatgtcaaactctatgaaatccagtcatttagcttaaagtacgtatgttgttttcatgctttccttcctgatgttgtttaaagttaatttttaggaaaacattttaatgcattgcataagatggcaatgctagggttagggctaaagaaagacaacatccttgagtttttctacaggtagatttcattttttatcttaatgataaggccagaaagtgccaagagatgttaagtgtccagaaagttggaagttttggtttgggttaggtagaaggtatacaatgaaaacatcttatataaaatatttaataaagtcagtttggttctccacacacacaaaaatgacatactgatgattaaaaagtgaaacatggccaggggcagcagtttcactcctgtaatccaagctacttgggaggctgaagcaggaaggttgcttgaggtcaggtgttcaagaccaacctgagcaacatagtgagacccccccagtctttaaaaaaaaaagtgaagatttaaaaattaaaacattgttacaagtgggaaataccagaggtaacattaatgaaaattaactattctaatttcaaatgaatcgtggaattaataaatgtgttcatatatggtctgcttcagctagaatatatctctcttgtttgcaactctgcggtcatgaagtcaacccttatggcacttatcattgtctactttggtaagtgccacgtaccattgtgtttcttgacatcaaggaccatgtctaatttatcttggagcctaccatacagagtcctggtgctgatggtgaattgcatttgacagtaactaaaaagatggtgggatatggagaggttaagtaacttgcctgttctaattttgggtgttgtttatgggggcagctatgtccttgaacttgctgtaatgctgtcataatgggtaccccaggtgcttatctaagggtgggctgtctgttttcagccccattagaagacaaaaagatgaactcctgagcagagctgacaccatgtgacaattgtgcctcctctgtgtttcacgtatctgattgtgatgtcactgttttgattagcagttattatatttggaaacttagcttagaatggagcactcctagtctgctgtttgttagtgcacatagctatttagaatcttcaactttaagaatccggtttgatgcttatttacaactgaagattcataagcaaatatacgttattgaacatttgtatccgttggctccttagagttgctccatccatttgtgatgcatgttaatagagagtgaaataaaaatacttgcatttaaagagctacatctgttttgtgcatgagtcatctgaagtttggacagctattctgatcaaataaataaatcttcctccagacaggtggcttacttgaatacgtctaacttattttcagttccttctgggaaatcttacatttagctgcagtctctaaactgttttatctgccaaggataagctggcaatgggaagctttaattagaattaatggggcttgccatggagaaatttagaaaatgtctactaccttttagtggcacaaatatggcaaaaatttaggcattgtctaagtcatcactgaacaaaccttattacacgaacatatttttatgagaattcagaatgtctgaacttagagtgtctgaatttagattgtcttaaaagaatgtacgtagttaaaatatttagttggtctactattagggaagataaatttttttcacttccctcctttggcattattttcttcctattccatagcaaattagcaaactaaaatgtaagtcaggtggtggggagtgcttttaaaattaggatttaacagaaagtaagtatacattttgtctgagtgaaatttgtccttcatatctatctgttgcatgtctgtttgtctaaactgaaggtatttgttaaaagcatcaccataatgaatagtaattcagccctttccaggcctagcaaaagcatttgctcatgtaacattaaaacattgaaaagaaagaatgcatgccttttgatgctaatatgaactttaagatttctgaatggaaaagtaaaatttagctatagttttataatacataaaagtgcctgaacacaaaacacttgattaattcaaaatttaagaaatgttggcaatagaaaagaattttgcctgtaagttttctgtgaaaaattatgtaaaaggcttacaggaaaatgtaaggtgtaaacatgtaaggggagcaggagaattatattgcaaaattcacagtgtaaaacttctcaattagtttacaggcaatggtattcagtgatattcatcattgccccatgccatttgtctagaattgtgtaaattgctacataatacgatattttaataatttgaacgtatcttatgattttgtagttttgcatttagagtctcaatgaagtgcttcaaaagtggtagaagatactacagggactaagaaaacttttataaacactgtgatgctttaacaaaaactcagtcatgtacctgtaaatatcagaacccagtaaggggagctagcagctgttgagtgtatgccttgtccaggcagtatgcatgcatcatcttggtttgcgtcatcatcctgttttataaatgaggacaccaaaaacaggcaggatggttagcaagaacatgggttgaggtcagatatggccccaaccctctctgtgctgttcatatgtaagtgggtgactttggataagctgttgaactgggattgcagatgaatacactggtcaagaggaagagttttggtttacgattcttgactaagttctagctgtagtagttatcagttctgggatctgcataaacttcatctgtaaaacaggaatgataacactaactcatatatttgttgtgagaattaaagtatataaagaagttaacatggtttgtggaaaacagcaagtgctgatacattgtcagtgataaagataatgctgctactgctgctgctggtagggttggtagggtagaactcttacagaaactgaggcatgtctaattccagagcacatgcttttcccactgactctggtcctggaaaagatcagacagaatggtatggaaatgtgccttgaatcacaagcagttgtcgtttttgaagtagaaaaactctttccaaaaatatacaaattatggaccactctgcagatggaaattagaaccaaatgcatggaaattagagcctactaagagagaaaaacaagacaacaaatacatccataccttgacctctgatagcagtaagtgctctgaagaaatgcagcctaagtgattagatttaacagacaggtgtgagggaaagatgactctagttgcttaagcacctgggtgaatgggggatttatttcatgaaggggggaatgctgaaggagaagtgagtagccgaggaatcaagagtattgtcttggctagtacaatttgagataccagttgtatatttcaatgcagatgtggaataagaagtcagatgtgtgacagtggagctcagaggacaggttggcatgacagtgttgatttgggagtcatgagattggaaaacatccatgaggaacccctctatggggagaagagaaggaatctgggctctggggcattccaaagtttggatatcaggaagcaaagctgaatccagaaaaagagactgaacagaggcttccaatgatacagaagtaaaaccaaaagaaagtggtttctgaaagccagtgaagggagtgtttcaagaaggagaaagccactgtttccaatgctgcgcttagtttaggtgagatagcagagacttgatcattgaatctgcttagtagaggtagttggagagcttgacaagaacaatttcagtgaatttgtggagaggaaagcctgcttagaatggagttgaggagacagtagaggcaagaaagtggaagtaaaaggtatagagacattgattgattgattgattgagatggagttttgctcttgttgcccgggctggagtgcaatggtgtgatctcggctcactgcagactccacctgccaggttcaagcaattctcctgcctcagcctcctgagtagctgggattacaggcatgcaccaccacgcccagctaattttgtatttttagtagagacggggtttctccatgttggtcaggctggtctcgaactcccgacctcaggtgatccacctgccttggcctcccaaagtgctgggattacaggtgtgagccactatgcccagcctggtgtagagacttttaattagcttttctataaatcagggcaggagaataagatatgaactggagaatgatatgggttttttaaaaggttgatttttcagttttattttactatgaatgatactacatcaatgttctctgctgatgaagaagatctaatagatagggtaactgacgttgggattgagggagagataattataggagcaatgttctccataggcttaaagagtatgatcaacatccaacatagagaggttgatcttttcacattttggatggcagatgatatgggccaagatgcagggagattgcagatttggtgggaagatgaattagttctcttctaattgcttctgtttcctcagtgaaataagaactgaggtcattagcaagtgcagtatgatggatgagtcatgttaattaaccatcatctgcataaactgcattcttgggcagcaggctcttgggagatcatttcgcaatagaattttgctttgtgggctatgttccctgccctactttggccataagtgctgttcctgtgttcctgccatgtgattcttagagataacaattgaccatcagtgaagagcctactttataccttcattttttcactggtaactctgaaagagtatattttatcagatggtagtctaagaagtaaagcagcaaaatcaatttatatatatatatataaatataaattctatatatataatttttatatattatatataatttatatatatatttatataaaaaaaaatatatatatatatatatttttttttttttttctggagacactcttgctccatccccttatctcccaggctggagtgcagtggcgtgatctcagctcactgcaacctccgcctcctgggctcaagcgattcttttgcctcagcctcctgagtagctgggattacaggcgcaaaccaacatgcccatctaatatttgtatttttaatagagacagggttttgccatgttggccaggctggtcttgaactcctgacctcaggtgatctgcccacctcggcctcccaaagtgctgggattataggcatgagccactgttcccagccacatttttattttttcttgtaggcatatatgttgttccaaacccctaacataaactatatggattgttatagagtgtgtcagaaggtaatgggaggaagcaactgcactatgaatttactccctgtcataaagaaattatattatagagcctttcatccacccagagatgttgacatgactcaggctgattctgaaatgatggaaacaggttatggttaataaactcttgtactttttgccagaaaaggtaatatttcaaattcttttctaatgttagaccttaatagaaataaatgcttattaggtgaaaaacatctaaaggaaatatttttaaaaaccaaattatatttttatttagttcagtaatcattcattgagcacttatagtaagctaaactatgggaataaacagttgcataattacgaatgattcaatgactttgatcttgaatttgttgcatacctgcagctgttctacattgtttattgggttgtattttgtcttattcccgaaatgattttaggaaacttatggaagatacattcaaaaatgtaaataaatataaattataaaataggaactaaataaaaataaaaacataataatatgggaagttaagaattagaagagaaaatcaacactaggggaagagctaaaatatatattagtgaccgtaaaggcttaaacacttggtaaagatttgttgcatatttgattctgagcttcttatcagccataccggaaagaaaaatgcagtccgttacatgattcttattgttcacaagggggaaaaaaggtcactcaagggaaaaaatacttgcactggcatctatatagttttttacatgagttttcctatagggcatacccaatgtgaatggtgaaaagtattgatagccaatgtaataatgcaacttacaaagttacttcttgaagcatcaggaccctgatattattttggtgatcaagaaaaagatcagaattagagatgaaaattgtgtgtgcatgtgtatgttttgttttttaaaaccaaaagattgaactttggaagtaaaagagacaggccatggtagaattacctaaggacttggggtaaaatcttggagatggcctgcattaagggtaacagaagagaagaatctcataaaggttgctgaaatgaaacaaagaaatgttagaggaggaacaaaattctgtagtatcacaaaaggcaaaggtaccaatgagtgtattaaaaaagaatcatctaaggatatgaaatgcgaagagaccacttcactgttggtattaccaagtagagtttaattaatgactttttgagagtagtttcaatagaacaagaaagggcaactttcttcacagaattggaaaaaaccactttaaagttcatatggaaccaaaaaagagcctgcattgccaagtcaatcctaagccaaaagaacaaagctggaggcatcacgctacctgacttcaaactatactacaaggctacagtaaccaaaacagcatggtactggtaccaaaacagagatatagatcaacggaacagaacagtgccctcagaaataataccacacatctacaaccatctgatctttgacaaacctgatgaaagcaagaaatggggaaaggattccctgtttaacaaatggtgctgggaaaactggctagccatatgtagaaagctgaaactggatcccttccttacatcttatacaaaaattaattcaagatggattaaagacttacatgttagacctaaaaccataaaaaccctagaagaaaacctaggcaatacctttcaggacataggcatgggcaaggacttcatgtctaaaacaccaaaagcaatggcaacaaaagccaaaattgacaaatgggatctaattaaactaaagagcttctgcacagcaaaagaaactaccatcagagtgaacagcaacctacagaatgggagaaaatttttgcaatctattcatctgacaaagggctaatatccagaatctacaatgaactccaacaaatttacaagaaaaaaacaaacaaccccatcaacaagtgggcaaaggatatgaacagacacttctcaaaagaagacatttatgcagctaaaaaacacatgaagaaatgctcatcatcactggccatcagagaaatgcaaatcaaaaccacagtgagatatcatctcacaccagttagaatggcaatcattaaaaagtcaggaaacaacaggtgctggagaggatgtggagaaataggaacacttttacactgttggtgggaccgtaaactagttcaaccattgtggaagacagtgtggcgattcctcaaggatctagaactagaaataccatttgacccagcaatcccattactgggtatatacccaaaggattataaatcatgctactataaagacacatgcacacctatgtttattgtggcactactcacaatagcaaagacttggaaccaacccaaatgtccatcaatgatagactggattaagaaaatgtggcacatatacaccattgaatactatgcagccataaaaaaggatgagttcatgtcctttgtagggacatggatgaagctggaaaccatcattctcagcaaactatcgcaaggacaaaaaaaccaaacaccacgtgttctcactcatagatgggaattgaacaatgagaacacttggacataagaaggggaacatcacacaccggggcctgttgtggggtgggggaaggagggagggaaagcattaggagatatacctaatgtaaatgacgagttaatgggtgcagcacaccaacatggcacatgtatacatatgtaacaaacctgcacgttgtgcacatgtaccctagaacttaaattataatgtagatatatatatatatatatatatatatatatatatatatatatatataccaaaaaaaaacaacaaaaataaaaaagaaagggcaggcttagagagtaaagtgtcagtaatgggaaagtgtgtatagacctcttctttcaaggaatgtagaagtgacggaattgtaggttggtagacttgggatagagggattgattggcaggcaaggaaggggaataatagtgtacaagatcccagaggaggagggagacctgacatgttcaacatagatggggttcagagaggaaagagtcaccatttttgctgagctacaaggaaaaaacaaacagaaataccgagaatctttgtgttggaagggaggtgatatgtttggctgtgtctctacccaaacctcatcttgaattgtagttcccataatccccatgcatcttgggagggacctgatgggaggtaattgaatcatggaggcagttacctccatgttgttctcgtgatagtcagtgagttttcatgagatctgatggtttaataaggggctctcccgccgcaccaccccacaccacccttcactctgcatatctccttgctgccaccatgttaagaaggacatgtttgctttcccttctgccatgattgtaagtttcctgaggcctcccaaaccatgctgaatggtgaatccattaaacctctttcctttagaaattacccaatctcgggtatgtctttattagcaatatgagaatagactaatacaggagggaagctataggaatttgtatcagatggcttctgaagtggttcaagatttttgaggtaatttgcaaagtgaggtgaaattatgtgtggatagggaatctatttaagtcatgacttcaggtcaaaatacaatgcttagaacatacctttttgaggttatgtagataccattttctgtctttaaatatgtcagttctttgctttcttagaaataatttagcttgccttgctacctttacaccatccaactcccacaggtgtatttctttctcttctccttccctcctttcattaaaaggccaaatggatatatatgacaatgaagtaaatgagctttataccaataggctaagtaatttatgaatagtactttttagaaaagtgctaggaaaatggttcttcactattttcctaaaacatttatagaaacttgatgaataatgaatgggaataatttataatagccacatacttcactcaaatagaacacttgtttatactcctacacagcagttacgtcatggctgtattttacataaggagtcatatatttttaatgtaaatgttgctagaatagtttcattcagtagagttatagaatcttggtgtcttaagagatctcagaggacagggtatccctgagaggcactcagctagacattgcttcacttctgcctaaattgtgcattccagtgatcatgagccatgctaaaatacagcataaataagtcatcaataagttgaatagcaaggctaggattgtgtctacatctttgctaatgaatataatgctagactttttatatatgcataacagatttaatcaatgaaaatatgtagaaacaagttttattttacagttgagttttgcagtacagtgggaagattgcatttttaaaagacaaaataagacttagcattcagaaaaagtagctggatcaaagcaatttctaagtagaaactcaaatttcagtcagtattttaaatagacacatcctgactcccttcacagattgccactgaccatatggtaactgcagacatgcctcaaaataaaacagccatatgtagattttcaaatactgacctcatccctagagagccatatttatctagaagagcatctcaagccatatcaagtagaattatgatttgtgtcatgttcaaagattagaagaatcagcctaatgaaaaacaatcacaagttaaaagcaaaatgccaaggaaaataaggttagatacccacagacatttaaaaagcaaaggcatctggagacgtatctttcgaattctccttgcccagtccttatacacagtaggaaagcacataaaagtagcattaaaatctatcctgtgctatggccatcagaatggatttaggggaatgcttaagggatgatcaataggagtgcttggcatgcgtatttcttctcagactagcagtcactggatgcaaatattttctgtctgctgaatgtgctaatggaataccaatattatttttttctaatttctattgttaaaatttctagagcagaacatgtggaactcacttctatggtttcctgctgttaatcattctctactgaaattctgccagttttccagaacatttagctttgtgggcatgtgtctgtgaattaaaaacatggaagaaggaacagaattgttgcaggaatttggaacaaatctatttatatattcagtggtacctcacttcccttatcaaaatcggggtggagaagggccagaaaaggggattcaggaagtaaaggtctacaagtaataagaagattctgtaatgatgatcattgtaactacaaaacctctctctctcacgctgtatttatgtatttatacatatacatacttctctctctctctacacacacataccccacctctctctctctctatatatatatatacacacacacatctctacatacatatgcatacatattttatatttatatatgtgtgtgtatcatatatatatgtatatatatatgaaaaaaagattttaatgacctccttatggacagtcaagccccgcatcccataggtgtagtattatgctagcagatttctcatgtccaagttttgtttaaatctgagcactcagggatatgccagttgcctaaaattaataatgttaatcattcctaaatgttctttaagagctttagtttttcctttgcattccttttaatgtagcagtatttcattggatttggttcagtgattgtgtttcagacatagtgatatatcataggtttgccttcaaatcaaatacagttatgatcctgaaggaaattacccttataggccaaactctgaaaattgtactctatcctaaaaggtcactgaaatttctgaactaatctttataatacatgaataaacctaaacattgttttttacaaagcaaggcccctcactagtgtatgtcactggatatataagtagacatctgtgaaatttatttttgaagtattattttggtttcttggtacgtaaattggattactttattctaagccaggtttgtaagtagtttttaaaagtcatttgaacccattcagattactcaggctctttcactgtgttatctcattttgtactcttcagttttgctaaatgtaacaagaggagactttaacagaaaaccttaaaatgttttctgcaataaaaagatcagttcttcatagaaatccaatagcattgtaaaattaaaactaatgttccagcataataatgtccataaacttgcttttcaatattaattcatttttggtattgatctcataagggagtgtttagttaccaactgctttaggccatgaaatgttttggggcaaagaaaattgaagggattgttttggtattatgttgctcttaacagatttttcaggaatacatagaactgtgttagttagctgacatcttttctgttatttaagttgtatttaattgggaaatattatatcttgtcatttgtatctgattgttttattggagaggtttttttcctgaaaatttgtaaaataagacaagaagactaaatggcttatctaataatttttttccctatagaaatctagattttgattcatacttaatgtgtagatcagcctttccactaaggttctcaaaggtggctggccttctttactaactgaaagcaggttcagcagcctcttatagctttcatggaaagagtttaattgaccaagatagactgtgtgttcgtcagccttaagaagagagatttgttttatttatatgctatgacataggatatgatgggattgtctttatgagaaaaatagatcctaagatccagcattcaccttgtgacctccaggaccctgtgcaccaaccctcttgcatatggtgaccaaattcatgtatgcatcttccttgtaggctctgtcagttatgttcccgacatggtaaagatagttttaaatctcaagtgtcctagcatagctaaacaaatggaagatatggttatatgtcctcctccttttcccatagcatttacattcttccataaccatttatgcttcttatctattttaggaatggcacctttataagtaagtgaaagatgagagactggaaagtccatactttgaattaactcttctcttccatgaacgtaatgctttacttcctaccacattttggagaacttagcactacccttttttatagaacatctttactctctctttatttaatgactaccactggtattttttaatatgtaaattcaatagtttttctttttccttttttagtggtacaggtaatagaagaatagaaaaagagagttgagggagggacaagaactactttgaaattagagaatacatttacagcctcatatgttcagttcatttttatatatatagttctgggatatttttggaataattatgattttctgagaatcatgctgacagaaaacatcgtctctttcttttaagatgttacatttcaaggtacccccttatgtttgcagtagtcatacttccggaatctgggggacaatttcaatttttttaaaagatactctgccccaacataagatcatgggccattgaattcaggctgagttttattttttgatagctttattcatgattactgttatatataaagccaaatatagcatgaatcatacatggttagcttttcactctaattctcattagtacttatttgttgaatgtctgaatctaaaaagggaatgtgctaatagaatattactcaatatccatataaaacttaaatatctatacaaatacagtttctttaaccaagcaaatgattaatgtttaggagcatagttcatctcaaaatgctctgctctgatagagattcaagaatacttgatttcttgggagcctacatgtgatctaaaatgaaggcaggggaatggaataattctgatttaaatgtagttgtaagaatagtttggcagtacatatcttgattgaacttgatagaactgtcatttattatgggagcctgttgtctaggtcttactcatttatgcctagtgtattgttagtaatctgtgtaggagtgttaaatataaaggaaagaaattataagtatagaatgcatttattctttatgttaatgaatctatttgaaatattttgtggaatcttaaatgtgaagggtaattgtttatttgattacagagaaggaaaacctatacaatttattggctatttttttttttttttttttgagacggagtctcgctctgtcgcccaggctggagtgcagtgccgtgatctcggctcactgcaagctccacctcctggattcacgccattctcctgcctcagcctcccaagtagctgggactacaggcgcccgccaccatgcccggctaatttttttgtatttttagtagagacgggttttcaccgtgttagccaggatggtctcgatctcctgacctcgtgatccgcctgcctcagcctcccaaagtgctgggattacaggcgtgagctattggctatttttaatgtaaaactttgaaattgtattcagctatggagaaattctactagagagcttatggatgaaatcatagcatcagtagttgaattaatgtgggatatatttctcatgcatttccacctttaattatgaaaacacctggagctcagggaaggtaaggaacctgcacaacatcacacagcttctaaatggccaagatagagtcaaacctgagtttccctgatttggagaaattgtactattcaacactgattatggttgtatagtctttagcagatgcaagtcatatatattctttttttccttgcatataatatctattgaaaaaccgggtaggtgagaaaactttattatatcactaagaatgacagcatattgtgaaaatactgtcagaataccatcagtcaagtgtgtctgtcctttcatttaaaagtggctttgtctaatggcaggcagcatggcacaataagtagccatgaggagttcaggcagagatgcataaatgggtgactgtgagtattctaagaaatctactggacatgatttttttgtctctatatgggatctggaaattctgccagagaggcatttgagtgatgccttcaagagtaacccatggctgggcatggtggctcacgcctgtaatcccagcacactgggaggccaaggtgggcgtatcacctgaggttaggagtttgaagccagcctggccaacatggtgaaaccctgtctctactaaaaatacaaaaattagctgggcatggtggtgtgcgcctgtaatcccagctactcaggaggctgaggcaagagaatcacttgaaccgggaggcagaggccatagtgagctgaaatcatgccactgcactccagcctgggtaatccatagggcttttctcaggaatgcgaaggtggtttgatgttacaaagctattattgtgacttactgtgtaacgctcatctccatagagggagaaaaggcatttgataaaattcattgcttttttaattaagtaaacaccccatatttatggggtatatgtgatattttggtacatgtattaaagttcattgttttttctccttgggaggttgaggtgggaggattgcttgagcccaggagttttgaagttacagtgagctgtgattgtgccgcagctttccagcttaggtgacagagtgagactctgtctcataaaaagaaaagaaaggccgagtgtggcggctcacacctgtaatcacagcgctttgggagggtgaggcaggaggattgcttgagcccaggagtttgagaccagcctgggcaacatgaaaccttgcctctaaaaaaaaaatttttttttaattagccagatgtgatggcatgtgcctgtggtctcaactactcgggaggttgaggcgagaggattgctcgagtccagaagtttaaggctgtggtgaaccatgatcataccagtgcactctagtctggggcacagagtgagaccctgtcataaacaaaaaaattattgcttattgataaaaggttagtaaaccaggaataaaagggaacttcctaaatctgtttaaggatacgtatcagaagctttcatcaaggatattactgatgaaactttggaagcattctctttagtccaggcgtggtggctcatgcctgtaatcccagcactttgggaggctgaggcaggtagatcacttgaggtcaggaattcaagaccagcctggcaaacatggtgaaaccccatctctaccaaaattataaaaaataagctgggcgtggtggcgtgcacctgtagttccagctagttgggaggctgaggcaggagaattgcttgaacccaagaggcagaggttgcagtgagccaagatcatgccactgcactccagcctgatgacagagcgagactccgtctcaaagtaaaaaaaaaaaaaagaaaaaaacattctctttaaaatcatgcaagggccaggcacaatggctcacgcctgtaatcccagcattttggaaggccaagacgagtggatcactgaaggtcgggagttcgagaccagcatggccaacgtggtgaaaccccatctctaccaaaatacaaaattttgccagctgtggtggcgagcgcctgtaatctcagccactcgagaggtcgagaaaggagaatcggttgcacctgggagactgaggttgcagtgagccaaaatcacgccactgcactccagcctgggtgacacagtaagactctgtcttgaaaaaaaaaaaaaaaaaaaagaatgagacaggaaaccatttttcaccatttaataaacgttgtactgaaaatactagccaatattaggccgggcgcggtggctcacgcctgtaatcccaacactttggaggttgaggtgggtggattacttgaggtcaggagttcgagaccagcctggccaacatggtgaaaccctgtctctactagaaataaaaaaattagccaggcatggtcatgcgtgcctgtaatcccagctactcaggaggccgaggcaggagaattgctggaacctgaaggcagaggttgcagtgagctgagatcacgctgctgcactgcagcttagacaatagaacgagtcttcatctccaagaaaatactagccaacattataaaggaataaataaagctgtcattgtttgcggaagtctatgtagaaaactcaagagaatgtgcagaaaatcttttagaattaatagagttcaccaaaattggtggatataaaattaacatacaagtgcagcatcaaagaggaaatgtaatgttaaaaaagataccaatgataatagaaaccaaaatgtcaggtactgcggaatcaatattatgaaatatgcatataactttagagaaaagtaactgatattttagcagaccccaataaagatatatttacatataggaaaaaaaagtggccctgtctatagacaatgctaacaatatagctatttaagaaaatcatatggacacggggaggggaacaacacacactggggcctgtctgggggccaggtgaagggagagcatcaggataaatagctaatgcatctgggacttaatgcctaggtgatgggttggttggtagatgcagcaaaccaccatggcatgcatttacctgtgtaacaaacctgcacatactgcatgtgtatcctggaacttaaagtaaaataaaatttttttaaaaagaaaattatttatttagaaaggatacttcctctttttaaataaaagttttctagaacagtaattcttcgtaattttttcctcagcaacataccacactcccatgactgttaagaagtttgaaattcgttcagttgagaattgctgaggaatgcattttatgtctgcttcatttatgtagatacttttgacaaagaaaatattttagaatttagaaagaattcttgatagtaacagaaattggtttttgaaaacagtattttagtggtattaagacctataatcatctcctcttctaagttgataaaaacctttacattagcaacctggaataataatgaccagattaacacagtcattgcataccggccctaatgtaccatgatcagcttacaagcacgcatctatagacaactggcccatcacaacatcttggcaaattgattgccttggaggattttggaatgtattggcataaatgccagactgtgaaagaatgattgaaccacatggggttgaattcatcaatagcagcagtccattctttcaagcagaacatgtgccaagcaccagcttgtaatcacaaacatcatctgctgcatattgaagaggaaaacagcgtgggtgtgctcaggatcttggtggtagtttctaattaatcacaacattgtttagcaacttggagtatactcaaattgcttcatccatgagttctcaatccccatacttgctctggtgtttctctttttttctcttctttccttcttttattccttatattcatcaaggaaatatttactgaatgtcctctatttacatgatcctgaactaagcacaatgggaagtaaaatgataaaatgagcaaagcctgaactacacacccgacataatccagcacagagatcataattcactatggaacagagatcagggacctagtccccaaaacaaattagccaggagtgagagcctggtccagtccttcagaattgcaaggatgggatcccaagcagaaggaacattgtaagagacaaaattgtaacaatatgggacttctttgagtaaaacagattacccaaaaattgctgaagcattgcctattagaggagaagtagtatgaaacaaatcttctcaggtgggctggggcaggagtgtccccttcatgaaacaggccctgatggttctgttatcaatggttttgaacaagtaagtggaggattcagtggggtgctttagccaacaggtggcagcaatgtggaggcgggatggattggattcggtagagactggggatgttgagaccacatattaggcttcttattgaacacatgaatagtatgtgccaggaaccttattatctctaatcctcaaatggatagtactactcttaaatccattttactgaaggggcgatggagacttacagaatctcacagtggctacattgtaggactggtatgttaacactggtctgtgtgaacactttccacagccgtgcactgtcccactgggagatggatgccagccagacaggcagtagaaaggtggggaggcagagaggtacaggtgcagaacagaagaaatctttccaatgttttgtggaaagaagttaggcatacatacattaattctgattaaaacttggcaatgtattagattcaggatatatgaagagagaaggagcactcaaaagccatgaatcttgatttactttgaaattagataacatggggtaaaaaacaagtttggggtgagaaatgaggacttctgttttgtatgtacctgagtggcatacctcttgtgggtccttccttatgccttaatctcataatactgtatatgtacctctgttagagcacttacaccattgtggcatagcttgttttgttttggtggatgaccccatcctggtattatgagctcctcaggggctgggcctcctcacgtttctgtccctagcatggagtaggctcatgggaagcgcttcaggtatgataaggaactaggggattcttggccagagagacaggagaaatcaatggaagtccaaggaggaggaatgcttaaagtgaatgttgtgagaacatgattgggagccagttagagatgagtgaaaggctcccctgatagcacgcaggacctgacatgctgaatttgtcccaaaatgagtgtggctcgtttttgtaattattctcaaacaatgctcaactccctggatgtgggaatggagaactccctggatgtgggaatgaaatgagtggcttgaagtagataaatctggaactgaggctggatagagtggcaggtgggaccatgaaaatgatgaagaaaatgaaatggaggaattgcagtcgtaaggagcacagagtatgtttgttactatagcttggaagtgtttcagttttgttttgtgttacttctactgttcataagttgttgattttttatgctaagaaaaataagcttatttaagtgggcatacaaaatatcttggcatttgtggcatgaacaagatgtcggcccaagttctctctctaaacacttactagtttgtgaccttggaagagttatctaatccttctgtgtttagtttcctcttttctaagatgggggtagcaacacttggtctctctgacttcacaggactctgatgatgataggaaattgttcataaggcaggaagggttattgaagtattagataatccattgagatttgagcaaatgcttaatactcttggtgattgtgtgagaatggccgcctctggttgcattcaggaaaggatcgtggtgttgggggatcttgctgtgcttgattgtagcccaattatagggccctaaattgaggagtggggagaataatatttgaagctgagcagtgattatcttgctcccagtgaggcccctgctttctccacaggggcatctttactttatcagcagtggggaagcctcctacagtttgcatcttgtaatccattagtcacaaagtgttccactttttcctccttaactttaatattaatacaaggtaaaactcataaataaataaaacaaaaagaaagggaagaataagagcaagaaaaaccttgaagaggtgttaagggggcttcatcattggcagttctctttcagcagtctcacagcagacttcattacttcagtttgatcaaacattgttgtttctaataacccccttgtgttcttacttaagggaatatcatgctctttgaatattgaattttttttcttatccagttcaccatgtcagccttcctgacatctaaagtctctagattattggtgaagctttttcttacttttgttgttgatttttagcagctctattgaggaataatttacatacaataaaaagcatgtatttaaagcatataatttgagacgctggcatatgtgaacaccatgaaaccattaccacaaccatgcaagtgaacatattgctgcctccccagaacttcccttggtgcccctttgtaattcctccctccacaggcaaccattgatctgctttctgtcaagttatttggacttagagttttctttgggggaacgtttttaacaaattcagtatttttaatagcttatagggctggctactcaggctatttcttcttgagtgagtttggaagattgtatcttttagggaatttgtctgttgcattgaagatgctgaatttaatggcataaagttgttcatgatactcttattattttaatatctgtcctgagttcacctcatttactcctgatattggtcatttgtgtttctggctttttcctggatagtctgtgcatttgttttctgtggttactataatagattactacaaatttggtagcttaacgcagtagacatttattttctcacagttgtggtggccaggtgtccactcctgtcccacaccccctccagagtccgtagaggacaacctcttccttcctttttccagcttctgggggcacctgtcattccttggcttttggctgcgtaggtccaatctctgcatttgtcttctctgcttttgtctcgaatcttcctcagcctcctcctgataaggatacatgtgattgcatttagggaaaacctggatgatctaggattgtcttccgatcgcaaaatttttaacttaattatacctacaaagtttatttttgacatctaagataatacaggtttcagggattaggatgtgaatatgttttgaggggcccttatttagcctaccatagcttggcatgaagcttatcaattttattggtcttaaaaaaacaattttggttttatggatttttctcaactctcttcttttctacttcatggatttccattttgatctttagtaatacttttagcgtgtgcatactttgggtttcactcgtctgtctttttctggtttcttaaggttgaaggtttcctaagagatttcttgcagtaattttacctgttacactttagctccattccacaaatttttataggctatgtgtttagattctttcagctttatattcttactaattttcatagaaatgtgttatttagtttccaatttgggggatgttttccagttgtctttcagttactgatttctatgttaatttcattatggtcaggatattcttaatatgacttgaatccttttaaatgagttgagactagtttagagctcagaatataatctacctcaggtaaatattctaagacattgaccatacaatttaagaatgcatatcctgctcttatttggtggaatgtggtttaaatgtcacttattaggtcaagtttgttgatagtgttcttggagtcttctatatccttggtgaatttcaggatacttgttctgtcggttactgagagtgatgaaatatgagagtacaattgtaggtttttcaatttcccttttctgttgtgtcagtttttctttcaagtattaatattttgaagctctcagtaagtgcatacacgtttaggattgttatattctcttgatgaattggtcccgttatctttacaaattgtattttcctgcctttgtgcattcttagttattttttattttatgtccacattataaaattttatctcattgagttttgttctcggataccattaagctgcttagaagcagttgagtcttgcttttatgctgttttagatggcattcaagtaatgtttaatctaggactaaacttacaccattattaaggtatatcccttctaaatactcttttgtatgcttcagatttttcactctggttcgtaggaacaggcactatccccagccctgtttgagctcctggaattgatttctctaaccctttccagtagctctttcccctgtcttgggttgtttcctcacacacctacactgatcagtactcaactgaatactcaagggaaattctgaagatctccagattctcctcctccctctctgaatctatcctccctgggtcctctgccatctgaattctagcccccttggcatctctgtattctgagctgcatcttttcaactcaaggaaacaccaatgtctgcctggtttacctgccctgtgctgcagcctggaaacttttttgagatattgagctggggacagttacagggttcgcctcatttgtttcccaaatctcaggtatcactttgcttcattgcctgttatccgctagcatgagaactgttgtttcatgcatttttgcatggctttctagttgattcatgtagaaagggaaagctgatagccattattctgtcttagctggaaatgaaagtcaagagctggaattttatacaaactggcttttagtgcatttttaatcatacttagaaaaccttctgtaggctaggttcacagacaacctatcatccacaaaagtggctgcccttgtgggactctttttcatccctgctgctggagcctctgccacctggacaaccttatgcaagttacttagcaacttggtagtatgaggtgttcagagtgaaggaagagggatgagctcattttgggatcttgaatctactgctttactatgggttatattttaggtcttttatttctaatctagttggttaaaggttttagtttttataatgtgagaatttctgtgtttgaaagataaacatttaaaataaaattaaatgtgaaatgtttgtatgcacaaaacatttttaattacaaaagcaaaagaaatgttttaagtagagcatgacattttaaatgttcacttatgaacattcagccaattaatgtacttgatttttttcttctgcctcatagattctgtgatataaagattaatgatggttttcatttgtaaaggaagttttactgcctaataaagctaggttcataattttaatgaaaggaaattctttaattttgtttatgcataatcagatgtgcagctgctgggaccaaaatttatccattaaaaaatgcagtctaataaaggaactaccatcatttatttttaacaggaaatccaaatcaagagaaaatataaaatccagattttaaaaaactaggaaatatgtgatgtttatgcaatagcttatctcttgtttttatggcaagtcaaactttggtcctaatttgtcataatgttctgtatttctgttctccaaaatcattattacctagcctgaccatcaaatcatgatacagtttaatagtgaaagtagatgcatctttccaaagattataatagacttcttgcattaggaaaaactaatttctcatctgagaaagggcttttgtttgtttttgttttgttgtctttttttaaaaaaaaaatcatgatatacaaggtaaatgttattatttttatttgaaagttttgattaaaggaaaggtagtgccttgcttattttgtgggtcacttgcaggtatctgtatttgcagatgagcctgcctatctttcaggttgctgatccagatatatttcagcattgttacaatcaaactctcaaaattcacctgtttcacacagtctttctgatatattaggctttaatactgctttgctcgaatctaaggcaatttgacatttataataccctcagtctgctttctaaatggatcgtcactacatttagctttgaatgaccatcaacgcttctctaaattaatctattccctctcttgccatttagaaacaaaatcatttgcaataactcaagttttatgattatacttatatccatgtaggaatagaatattctcacccctataatatttcattctaattaatgccctggcttgacgtcccatactaacttttattgctgagacaacatacatattgtattccatttttgtgaatttgaatattagattttcaaaagatcctgaaatagttagacttctttggattttaatttaccggacttggtttagagttcattaacaaaacttggactctaattaagcagttagcattgcagtgatcccaggccatctcttctaacagcgggaataccataggtcctgggagttgactctagctccattaaggacaccatatagaatgcctcttaaagctaaggtgacattgtaactgaaacacttatgaggctggaagggccacatttagtaattatgccctgacaacaggcatcaataaggttagtcaacctacttaaggactcagtggttcagatttacagctttccagaactgatccagagttcagataaagaccaaagtatctctgccattttgaaagttcatttgtattttaaaataatcattgattgcctcttaagggactattcaaaatttagaaatacacacacacacacacgtacacacacatacacacatctatagataataggtattaattgtttttctttattaactttttggtaacttttattaataatctccattgtagctataaccaaggctgacatcatgcccaaattctgtaactttagtaaaataacatgaattttgttctttaattcttcttaatgaatgcttttcttacggttgattaaagcaattttgccagtgacttttaagtagtcccacatggatggattttaaataatacttaattgacaagaaagttgaagaacaaaggaagtggttaatctctagagcttgtagggatttaaggaagactaatttgacagttttagttatataggtcttctagtacccataaattgcttaaacttaaattatctcttgtcgcttttacagttcaaactaaaaacaaaaacaaaaacactatctgtttgcaaaataaaatattgtacccagatttctgtaaaaatagagttgttctgatttaaaatgcccagtcatgttgatttcatgaagatttaggaaaatttgtcctattgggaataattactatgagagctaaaaataatagttgtattttttttttctttctttcttaaaaaagctggacctgtgatctgcagaatgctgagttatcccccaactcgccgagctttaattgtgggttgtggcctacaaatgttccagcagctctcaggcattaacaccatcatgtatgtatttctttctggctttttactgaaaagattgtgaaaggattattttatgtgaaatagtgaaaagtatttcatgtaaatactagactcagtgatttgttctgattaaatgtatgaattctccttttgggagatactgactttacaattttttaattccagtaatttgttactagataaaggtgatttattttgtttgttatatgattggctttatttgattccataaaatttctcttttacgccatccaatacctccttgtattctgagcttaaatgtgtcattttttctaagccatttcttgatgctggttggaaagcaaaatagaaggaaatcacctggcattgccagagattatgggcacacagataactaattcatttctttttggtgcagtctactacagtgcaatgtgataaggacattagtagaagtacgtttattataaccagagtatggtagaggggagattgagtgggaaggagagtgaggaatacagaaaaattccctgttctctaattttaagagtaattcccaaagctgtatgtgtgctgagggtgggaaggactaaatattaagggctctactaggtttccctcattcagtattaaacccatttttgagggcctctgttgcactagacctacagcagtaactaaaatagacctgggtcttgtcctcatggatgtacaggctggtagaggaagcacacattaaataaactcacagttaaatataagatttcaaactatgataagggccatacaggactctctcaattctctacagagtagacttttaagatcctaaatcataaaatacagtttagagaaggttatgtgctttcccagggcacatattgttagattaaaagctgccacatcttagaagtcctccccactccctgcctattgattgaatttttttcattaagaaaatacaaattatgtaaaattaaattttctttggtaaaccatttgtatttgagactcttgattttttttaattacttgagatatgatgagttatttagtgactgtttgagaagagtgaattgattaaaatatttttaaaaaagaaggattaggacccaatgagccagtatattaaatcaagatttgttgagaaactccattttctatacattcacacactttgtggatttgactttaatcataatccctgttgaacttcaactttcgagactacatgttcaatattttgttctctcctgcttctctctgacattaactttcattttttctcacctttaccagctctattaaggcccatctgttggtctagtgccaggcacgtttgattgcttgttctctgaatttggcacatcatgacttgttctgagatgtgtccaccttctgcagtctggtggaagtatagaattgcagctaggctaggaccaagcatcaaataattaaatccattaataatcctatgtgaattcgttagttgaccaacctaatatttgttctggttttgaaaatatgttttgtttgttatgctttttttcctaagcatttaaacttgacaagtataaaagcatagaaagtgaaggatttttcttgtactttttttgttttcacttaaaactggtatcacaaacagagccaactctagtttatgggtagtgactggggccagtgtattcctagtttgaaatgactgtcataatccattagcagtagctagtgtaaattgagctgattgatgctgtcaaattttaataaaacattcatttctccaaa

SEQ ID NO: 14047 - DNA, 3082 bp, Homo sapiens
cgcctcccgcccgctccgcagcgccagctcggcaggcgcggggcgtgagtgtggagtgagacccgccgggctccaactccgcagcgtcggagcgcggcgggcagcaactttctccccggagcggccgtggcggcggctgctgccgtggcagccggagcggaagccgggaggaagaaagcggcggcagcggcggttgctcccgccggctcgggctgtctagctcgccgagactgccggcccgcggagccgcgtccccccgggcagccccgggcccctgccctatgtcccgcaaggcaagcgagaatgtggagtacacgctgcggagcctgagcagcctgatgggcgagcggcgcaggaagcagccggagccggacgcggcgagcgcggccggggagtgcagcctcctggctgccgccgaatcgagcaccagcctgcagagcgcgggcgcgggcggcggcggcgtcggggacctggagcgcgcggcgcggcggcagttccagcaggacgagacccccgccttcgtgtacgtggtggccgtcttctccgcgctgggcggcttcctgtttggctatgacaccggggtggtgtcaggggccatgctgctgctcaagcggcagctcagtctggacgcgctgtggcaggagctgctggtgtccagcacggtgggggcggctgccgtctcggcgctggccggaggcgccctcaacggcgtcttcggccgccgcgctgccatcctcctggccagtgccctcttcaccgccggctccgcggtgctggctgcggccaacaacaaggagacactgctcgccggccgcctggtcgtgggactcggcatcggcattgcttctatgacagtgccagtgtacattgcggaggtctcaccacccaatttaagaggccgattagtcaccattaataccctcttcatcacaggagggcagttctttgcaagtgttgttgatggagccttcagttatctccagaaggatggatggaggtacatgttgggacttgcagcagttccggcggttatacagttttttggctttctctttttgcctgaaagccctcgatggcttattcagaaaggacagactcagaaggcccgtagaattttatctcagatgcgtggtaaccagaccattgatgaggaatatgatagcatcaaaaacaacattgaagaggaggaaaaagaggttggctcagctggacctgtgatctgcagaatgctgagttatcccccaactcgccgagctttaattgtgggttgtggcctacaaatgttccagcagctctcaggcattaacaccatcatgtatgtatttctttctggctttttactgaaaagattgtgaaaggattattttatgtgaaatagtgaaaagtatttcatgtaaatactagactcagtgatttgttctgattaaatgtatgaattctccttttgggagatactgactttacaattttttaattccagtaatttgttactagataaaggtgatttattttgtttgttatatgattggctttatttgattccataaaatttctcttttacgccatccaatacctccttgtattctgagcttaaatgtgtcattttttctaagccatttcttgatgctggttggaaagcaaaatagaaggaaatcacctggcattgccagagattatgggcacacagataactaattcatttctttttggtgcagtctactacagtgcaatgtgataaggacattagtagaagtacgtttattataaccagagtatggtagaggggagattgagtgggaaggagagtgaggaatacagaaaaattccctgttctctaattttaagagtaattcccaaagctgtatgtgtgctgagggtgggaaggactaaatattaagggctctactaggtttccctcattcagtattaaacccatttttgagggcctctgttgcactagacctacagcagtaactaaaatagacctgggtcttgtcctcatggatgtacaggctggtagaggaagcacacattaaataaactcacagttaaatataagatttcaaactatgataagggccatacaggactctctcaattctctacagagtagacttttaagatcctaaatcataaaatacagtttagagaaggttatgtgctttcccagggcacatattgttagattaaaagctgccacatcttagaagtcctccccactccctgcctattgattgaatttttttcattaagaaaatacaaattatgtaaaattaaattttctttggtaaaccatttgtatttgagactcttgattttttttaattacttgagatatgatgagttatttagtgactgtttgagaagagtgaattgattaaaatatttttaaaaaagaaggattaggacccaatgagccagtatattaaatcaagatttgttgagaaactccattttctatacattcacacactttgtggatttgactttaatcataatccctgttgaacttcaactttcgagactacatgttcaatattttgttctctcctgcttctctctgacattaactttcattttttctcacctttaccagctctattaaggcccatctgttggtctagtgccaggcacgtttgattgcttgttctctgaatttggcacatcatgacttgttctgagatgtgtccaccttctgcagtctggtggaagtatagaattgcagctaggctaggaccaagcatcaaataattaaatccattaataatcctatgtgaattcgttagttgaccaacctaatatttgttctggttttgaaaatatgttttgtttgttatgctttttttcctaagcatttaaacttgacaagtataaaagcatagaaagtgaaggatttttcttgtactttttttgttttcacttaaaactggtatcacaaacagagccaactctagtttatgggtagtgactggggccagtgtattcctagtttgaaatgactgtcataatccattagcagtagctagtgtaaattgagctgattgatgctgtcaaattttaataaaacattcatttctccaaa

SEQ ID NO: 14048 - DNA, 42474 bp, Homo sapiens
tcacaaatttcattttcacacttgtgggagtctggcttgttgagaaggtgggccgcagaaagcttacctttggtagtttagcaggtaggtggctggataaagaattcaattataaactttatttcctaataacttcaagtttaaccttcaaaaatacaatacttacaccacttctaatattggtttctcagccaaacaacaaaaaaattagagttcttctagaccaaaaaagaaaaaaaaaagagcttttaacaactgttacgctacgtgactagaaactagaatgagtagaaacaaactgcaagaataatttggatctactgagggtaacatttttctgttacttgagttccactcaaaggtacaaaagtgaaaaaaaataattgttttttttttctatccttttttgaaaaactaaaaactttggattcagaaactcactttttaacatatatttttaaatttgacatacaatggaattaaatttggagcattttttcaaagctctttcagcagtggaatattagaaccatgtaatttcttcacaaagcagggacaaactcttttgtgtttgaaacaggcctaaattccagggtaaattctggttggttaaatgtattttctatgatagcaaaataaagcaaaaccttttttttaattcccaagtatcttttgtgtttaaattctgcccattttatttattatttcactgtacacaaggactgtttcattgatagaatgagacccacatatttaacattgattttacatggctgcatggtataattttctaatttttttcaaatatgcaagtacattcctatgtatcaattagctatactctaataactcctttataagtttatttggagtgagaatgcatttttccattaaaagatagtttccagggcagcattaactaaattctattttaaccaaattgtatcgaaaacattgatctaatagaactgtttcagtcactcatcccatatttgatgagaaaatacattctaagttccaaacccagttatcagaaatacataccctctcctgaccctcattccagaatgaagagtagaacgctttcacctcctgttcttgcctaagcagtgggagcccttgaatccaataatgtgtgctgaactgcagtatcagtgctggagggaaaggtgagagattgtctgattaaggggcaaacatgattgccaacagccaggatatatactgaactaagacagtaggtaaatgaataaaagtgagggacaagtaaaggtttcaaaaccatgtttataaacctgttgaagaaaccagaggtatatagcctggagaacagactaaaggcagaagcctaccaggtattttattttagcagatagtagatgttatgaggacacagatttttacttaatataagaaaaatatccccaataatcagagctatccagcaatgaaatggactgaatcattaggatagtaaactctcaacgaaaggatagattactatcaggcagtgatgtgttaaaaataaatttccacagtgggctggaaattggatttgctgacccttgattttcagatgaatgctaagaagagataatagctgcttttaaatatttttaatggatgacacccttctttttaaatagaactccagtatattgctacctcaagaagtctattttttaaatagaacttaattgcttcttcaatttgggatttggcctttgagatctggggaaaactgactaaacattatttctagcaacctgtgttcgttccttcatttggtattccagtaaaacactttcttatcagttctgtaggatttttgagcccttattgatacagagctccagactgtttggatttgaatagtgtgactttgggcaaggttctattttctcatttgtgaatggggattaattatcatccctacttcacagagatgtaatgaggatttaacacatttacagatgtataggatttcaaatactacctgacacagagagtaaagggctctgagcattttagctgtcacagcattattgttaccaaagagtgagcctttgttgcttgaacaaacttagtgcaaaagcagcctccatcgtcataatctaggaatcttcctgaactcttctggcctatgtcatgtttccctctcagtgtaggtcttctgcccaaggatttccagagccatccctgactgttaaggggaagtattaagacaattcctcgggaaacaccaggggatttcagggtctgcttctcatgagcaacctataggcacttttctttcctgccttgttctctttgcagctgaaacccaccaaggcctcagttctgcccactacaaacactgtacagtgattccttagcttgagagacacagtctatttgatttccttattatgtggccaattcaagtgatacagtggatataacaatggtttgagaggtggaagtcctggtttcttgtcacaagcctcacaggtctcctcttttacctgtacacatagtaaatggtgccattcatgtggttctgctgtttcagtgattaaataggtcctactagaagataatgaccaatggacctttacaccttcagaataagaagtaccattcaacaaccttgttaacacattagtattactccagtgtgaccctcactcacaattgatttttctttcacattcctatactgattctgtgttagttgtatttttatttcagtgtgtttttgttttattcatttatatgtagatatatacttgacattttaatagtactaacatacggttctatgttaaatttcttaaattggctatagcctcgaatttttaacctttgattcagtatcgttccctattttgtgttcttactatgatttattttattatattggactaaaaatagtgaaaaatgttatatcaagatgattttttgttagatattcattcttttaaaatgattacaaataaaaaatatgtaagcctggacaaaggaactctttatacaaagaagtacaaaatatgtagtccatgaataatcttaaatgtaggacatttttggtgtttgactttttgtattttcaaagcttgttcagagaactggacttttctggtaaatattacaaatttaatgacaaattcttgattctttaatattggaagatttggatctatgtagctttattggtaatgaatcagaaagccagaaagattgtgtttttcccccctcatgtattttggtagtgtaatatttctgaaaacttcactcacagacggtcttcatcacagttgccaaggatacttattttaaaacatggattattgggccttaacccagatctactaaactagaatttctgaaaatgagacttgaaatatgtgcactttagacacattccctaggtgatacttatgcacacaaagtgtgagaactactgctctggtagagtcatgggaagggaaattattttgtttttttgagtatttactaataagccaaacactgtacctggtactgattattacaatagatatttttaataatgctatttattcagcacttttcacttcctgtggagaatatttttatttgccaaattatatcaaaattccaaaatctaatactgtatttggttaagagagactcttctcttgaaacataaagaacatgccaaaactacacagtacaccagataaaattctttcatccaaagccttcttgtattagactcaaatccaggttgtaataatgaataacttgacaataaccagattgattttaaatactaacaagggactgataaaacatctgtaactaactaaatataagtaaaaaggtaattcaagttgttttatgctttaatagtgtatatgagtagatgataggactaagtgattacttaaaaatttattttataaataaagtcgtttaagataccatttccttcttgtaaggagcttatcatgtcataggggttttagccctgtcttggcatcataaccacttgtggaaagctttaaaactcagatattttgtactgatcttctggagactctgattcagaggttggggtacatccaggcatttgcttccaacaggaagccaggattgagaaacatcactatatataataacaaaagagtataatgctggcttttaaaatattttcctccaaaatgggccaaaataaaataaatttggcttaagaagagttaacttttacctatttaggaattttctatatacagaatagtttatttctcataatttttaggttggttggaccttaagagatagatgtagagtcatattatccatattgcagagctctcatttaggatagttgtaccatactaacctcatgactgtaattggatggacttaacagttttttttttgtttttgtttttgtttttttcaaaaatagccaacattgcgaaaatgtatagtatggtggcccatccattcaaccaatatttatttgaatctttatatgccaggcactagaattggaccttactggatatgtgctaggcataccatcttagagtttatcattttcatggagacaggttatttaatgagtgttatgaaagaagagactcatctttccttcacatcttaatatatcaaagtttcctgatttaaaaaatcttacctgttgcatggcaataagatatggatgtaatttgggaaaatagggactcagattttttgatggacagactaacagtaaatctcatggttcgttttgttttgttttaggagagaggtatgatcttcataacagacctattatatctcttttctgttttccaatttggggcttgatagtcttttgagaaaagtaatggctcaaactattcctagttctggtttgaattttaagccaacagtagttaaacaaactgtgattttagttttatcgcattattggcctggttttgcaaaatagacttctgacctttctttaatcctccccatccttcaactttgttctgttattttgaaggcttgctgtggctgctgctgctgctgcttgtaataataatcatagcataataactaacatgttatagcattaaaacatctttcggccgggcgctgtggctcacgcctgtaatcccagcactttgggaggccgaggctggcggatcacgaggtcaggagatcgagaccatcctggctaacacggtgaaaccccgtctctactaaaaatacaaaaaattagccgggcgaggtggcgggcgcctgtagtcccagctactccagaggctgaggcaggagaatggcgtgaaccccggggggcggagcctgcagtgagccgagatcgcgccactgcactccaaccagggcgacagcgagactccgtctcaaaaaaaaaaaatctttcaaatacattatgacatttaaaattcactgtaagcccgtaaggtgagtattttcactaagccctattttacaaaagacaacattgaattatggaaaggttgtgtcctttatccaagatcacagagtcaggaaacagcaaagctagctaaaaactacagtcatctgatcccaaggtcacctctgtacccataatgcctggcttcacacacctactatgtcttaaacaaaaacatctcaactattatataaccgtgttgtacttccacgatgcttctcaatgttctttttaaaatctattttgaatatttttgttcataatttaaattccctccaagcttaactaataaaaccttaactactactaaactgccctcctaaattccatgttttaaacttattttgtctcattcaaataagttgtacaaactaacacagccatattctcttttttaacttttaatttcaggggtacatgtgcaggctcgttatataagttaacacatatctcagaggtctggtgtacagattattttgtcacccagataataagcacactactcaataagtagttttttcatcttctcctttctcccaccctctacccccaagtaatccctggtgtctgttgttcccttcattgtatccgtgtgtttttatcatgcagctccaacttttaaatgagaacatgcagcattaggttttctatttctgtgttagtttgctaaagatcatggcctccagctccatccatgttgctgcaaaggacatgatctcattcttttttacagctgcatagtattccatcatattttctttctccattcttcccatgacccttttcgtttaccctcacaatgtctgtggctcaaacaatagtcagaaacttgaaaaatgtcttatttgccattaggatgtctataagggacacaaaaattattcttttaagtgatatacttaatcaccattcctatatgttaacaccaaaacaaatatttcactttcaaataccaacaggaaagaaaaaagaatatatgtgatatattatttctggtactttaaagtcttcaaaaaatgctactccattttaataaaacatgctctttcaactgctttagaaataactcatttgttaaactaaaaaggtttaccaatttaagtcttacatgattgaatgtcattagaagaattttcttggcaccaaaaggaacacttgatggaaatctattgtctttcgtgcttcttgatatgttaggcactcaataatgttgtcacattaattgattttgagattttcagcaatactaggtgtgcgtggtttcttttaaaaaatcattaccaatttactgtttggctagcaaatgtatttgctttgaatttcactctcatcatgtctcacaatgaacgtgctagtgaatagttctgataatttgtttatacattgggagtactttttaaaaatccagtgaagatagagcacggtatttttttttcaggagtttttgtttgtttctttgttttttggtttgtttttaccaaacccagtctgccttaaaacaatattgtcaactcttctctaatataaaactttttttttttaaggtaccaccgtagcactcattattcttgccttgggatttgtgctatcagcccaagtttccccacgcatcacttttaagccaatagctccgtcaggtcagaacgccacttgcacaagatacaggtgagattccattatgttcttcttcctttacatgactctggtaacttttttgcttgcttttaacttttttaaagttgtagagatgagtaggagcttgctgggcatccaggcttatgtaagaagggaagaaaatgggaaaggtggtagagaggggcccctaggaagaggaatagcttgtgcagatgtgtgagtgtaaggaattaaggagagagtgggttgttagacacaatcttggtgatgtttctctggaaattaaaattagggattgatactgaatctaagcaggaattcagaaaagctattttagatcatatacaattcagtcacctctgtgttccaagcaaagtaaataactttaatcagtaatcaaacttttacaagatgcacatgccctctgaatattctgacaatttggactgatttgcatggctatcctcttattcatttaaacagaaggaaagttttccctcagtactgaggctctttcagaggatcaggaagtaaaaagtgatggtgaaagaaaacaaaatgttctaatggctagctgcaggcctaagagctcattaaatctaacagtgtacacactatgtgataaatagatcgaaaagtagataaatggatagatggactgagaacacataaatgaaactttgagtgattggacacatcgattaatatatttggcagcagagcttcaaagttttaaactggactttagccaccataaagtctagcaatccctttaaaacatatagatagaataagacctagccttaacaaaaatgtatattcctttagcttgaaatagatggacgcaagtctcaaatcaatgagtaaatgatttattaactcatacaaccctatatgaaattaaaacattataccctaaactccacttggtattcatttagagcatccagttgagcgtgaatttatggtggctgttcattacaacagtgaggaagatatattggttccaaattgtgatctatgtgcctttggaaaataggcatcatagcacgacttttattttactgataagtttgtttattattggctcactgactttcatagtctttttattgttctaagaagacttaagggtgtcttcatagtagaagttaaccatagcatctttatttggacatctgcctcaattgctagaaatgcatattctacttttctttttcttgatggatattttacttatatgtttttaacacagttactttgaaaaagtattttaaaaattactgtcatttgagaatcatagaatattctccagatctaatgtctgatgtagatgtattgttcagaaatactgttaggtcaactaaagtcagaaaatcacctaaaaattattagaaaaagttctttgaacttctgatataggaaaggaatgactgtaagtttttagtgatttacataatgaaatagttttcctgacattgactttaaagtttaaataaaaatatttattgcccaagtatatctcactgcacagcagtttatgatcatcagtctgttaatccttatgatgtaaggtattatcatctaactcatattttaatattcaattttaatgaggtaagagaagtgatacagcctacctttattcttattacaaaaataagcagccatttgtgaagatagaaccaaattttaggtgtccttcgggagtcagtggatatgaaaaacaattatttattgtatgagtaacatattaggctttgtgggaatttgacagtatgtatttatagtctaagtgattttgtaaaatatggctgcagtccgcttactgggtttttatggttaaaaccatctataatcctctgctctaccagctgagcagtaattgactgtattagttattttaaaataactaaaagagtagaattggaatgttcctaacacaaacaagtgacaattgcttgaggtgatgaatatccccattaccctgatttgatcattacacattgtatacttgtattaaaatatgacatgtaccccataaatatggtccactattatgcatacacaataattaagaataaaaaccatctatatacatttcccctttccttaagacaaacaggaaaagaatcacataataccttaagatgagtgaagttcactttgtaaatgtagatagtatgctttccccatggagtgatccgtataggaaaatttagcaaatgaaacagattttaaaggagaagtagtttaatatcttagtaacatcatattctattctattagtgggagcacaaattgttcttcattttagaaagtgatatggttctgcctaataaaagttaagtgcctatgtccattgactcagcacgtccacttgtagaaatctatagaccacagtgatgagtatgcagttcattcttactagagaagatttaagaaagtaaatggttaaagaacaatgattcttcttgattttaattcaataaatattggttgcataccaggccaaaaatattgtaggttagagctccctaatgacttgagattcaagagatcgacaaccctaaataattttcaatgaggacatctcctttttagaatattttaagtttttgattgataatgtattttccaaggcctgattcaattctctggactgaatgtattaaagaatgtctttcagaacaatgagaacatagggacacaaggaagggaactaactacacacactggcgcctgttagggggcagtggtgggggaagggagagcttttggataaatagctaatgcatgcggggcttaatacctaggtgatgggttgataggtgcagcaaaccaccatggcacatgtttacctatgtaacagacctgcacgtcctgcacatgtatcctggaacttaaaattaaatttaaaaaaaaacaccttttagatctgcttttaatagataaaagtgtgcacaaagataaagacagatgcaagttgctatagaaaatgtttggccacctgtataaaagctgtcatagggtcccagctgcagctagaagaaataacgctagcatgagtatcatctgaatcatatatctttatgagagttcacacacatatttctttttttcacacccataattccaatatgaccttcagttccacactctcaaattactaatgttctattcctttcatttccaattcaaaatattttctcataagagctagccaagatttgaggaatcaaacctttcctatgtacgcttccctcaaatacttgacgtattattatttatggtgtgatctcagtatatgtaaatcactatcataaaacatttaaaagtagacagatatttcctaaagcatacagttgtagaatttcaaggtagccttgccctagggtttttatcttattcacttattatttcttcatgcatctaaatatattatggatcacctaccataggattatagtaaggataaattaacatatggaaaatgccttaaacagtgcttggcacataataagcactcaataaacattacagtcattgttagaattaataaagcctgtaatagaagatgaagttgggatgatggcactcagagaagattaccttgagaatgggatgtttgtactgagctcttaaaagaagagtggagtatgtcacacagaaagaatggcaggtacaaagatcctgcaaggcagtaaggaacgtggcaagtgcaaggaactgaaagaagatgactatggggtcagagaagattcagataagactattaagacagatcagagccaaatcatgtagagcctcagaggtttttgatcttcagtctaagaacgtaaatccatggaagaattttaagcaggggtgtgccttgaccacattttgaattctaaactgtctctgggtgggtgtgggtgccaccaagagcatgtgttcatgtagggagactggttttttacagttgtctatgagagagatgacagttgcctggattatggtggtgacattggagataagcaggtagacagattctcagtgtattaggagagaaaaatcaataggaaatttaaaataaataattaactgtggccataggaggaaggagtctttggttggttctcaatttctgcatgagaaaaaaggtggactaaatcataaaaataagatgcagcaattggaagatgtaagaccatgcgtgcaattttggacatgtggaatctcaggtgtccatgaaccaacatcagctgggatattgaataggtatttgggaaaactggcccgtagttggaggagagttctagaatgaagaattattatccatgcatgataattaagtccatagacatgggcaacatcttgttcacaactaagatctttatcaagactctagctacctttgcaattcataatctatttgtaaaccactagtagtttactaatcaattgggcagtatctctccattcttcaggcttttaatcccagcatagaatcataagctattcatgctggaaggccttaaatgtaacctaattcaagcctttcatcttacacctacacttacatcttacttagtttccttactgaggtccaaataagtcacactcctctcctagggcacacagactaaccacctattctttaggcttctcttgtccccatacagaccttccttttttagctaacacagttctttaggagttattgttaatatgaaaccaacgacacaacagcttctttttctattcctttcaaaccttgctcttcttgctttggaccaaggacatggtttttctgttaagatgacttgtacaattaggtaattcaaggaatttaatgatgcctagcatattacctctttgatacagatcttgctatattttagactctgcttgagtagaaattgacaaaagggactatgcctctagttcattatactttttctttttaatacttctcaattaaggccagacgcaatggctcaggcgtgtaatcccagcactttgggaggccaagtcaggcggatcaccaaggtcagcagtttgagaccagcccggccaacatggtgaaaccccagctctactaaaaatacaaaaaaaaattagccaggtgcggttgtgggtgcctgtaatcccagctactcgggaagctgaggcaggagaatcacttgaacccaggaggtagaggttgcagtgagctgagatggtgccactgcactccagcctgggtgacaagagggagactctgtcttaaaaagcaaacaaacaaaaacttctcaattaagagtcttaaccagggtcatctgcagaggtacttaaagtcacctgttttccctttccagcggtcagcctcaccaggacagtggcatgttgttttgaaatgctccccaggtgatgccagtacatcttccattaagaaccactgccataatgctatcacttttttttttttttttttcagaaaaaaaaaaaaaactgccagctttctttctttttctttttttttggtttttgttttgttttgttttttgcttcttgaacattgttaaaccaagcataagaatatgatcaatgtggttctttttctgtatagtgatagtttcacattttcctcttcagatgaagttccccaaaatccaaattgacaaactgtggcttcatctgtagatggtggtgacactggttttgtgaaacagtatgcccctcataaattagtcccttcaaagttcatttccaataaaaattcattttgtattcactacactgccttttcttctccttttgccagccttgtgttatttaacaaacgcatcattaacatgagcactgtaagactgtcagattcgatcataaaacttttatgcaaccttagaaatgtgtaaaaacggtcgggcacggtgcgtcacacctgtaatcccagcactttgggaggccaaagcgggtggatcatgaggtcaggagttcgagaccagtctggccaacatagtgaaattccatctctaccaaaaatacaaaaaattagccaagtgtggtggcaggctcctataatcccagctactcgggaggctgaggcaggagaatcgcttgaacctgggaggcggaggttgcagtgagccgagatcgtgccattgcactccagcccaggcaatagtgcaagactccatctcaaacaaacaaacaaaaagaaatgtgtaaaaaccctattagcccctcttttttccccagtatttgacatcctggtaatagtgtgtttagcatcagtaattcatagcatcttgacagtgaatataatattatgctgtgaattgaaacaactttccatttgtgttaaacatttttttttcttactaatttcctataaaatgaatctgtttcaatttttttggcatggtggcacaagctaatataccatgaggttactattaataatgctacagtagaaaacaatgttgtatgtgttactaatatctacagacccattggagataaagataaatgtacataagtcaattaaaaaggaaaatgaaagttggaacaaaaagtccacataaatctcatcctgtgaccttattgccaaataactgcacatatcttttgctaacacttaaataaatacccagtgtgctgaatttgacacctggagaggattctgtccacctgtcatggaaggatacaagagcttcttggaggaagtttgccatttatgggacatattctttgagttcgccataactttttaattttgatgcctaggcttttagccacagacttacaaatcccccacttggcaagacttgctacccaaaccttggttttttgttttgttttgttttcctatagtcaaaaaatgcttcttgggaagccagaaagacaagaaggaggactcaagattaggtttgcaaagatgaaggaaaagcatttcagggagagggaatatcagggaatgtgtacaggtcctaagcagggagtatggcttcttcaaagaattgaccaacaagactgggtcataacgagcaagcaagagaatggcaccaaaataaactggatagcaggccaatgacagaacatctcaggaccttatacaccaggagaattttggacattatcttagaatactgagaagccttcaaagggtaataggatgagaatgacattatcagatttgtgtttttaaaagatcagtctggctgcagagtggaaaattgattacagacagacaaatggtgatgaagggagaaaggttaaaagaacttagtagcctaggcaagaaataacgcaaccttgatggtgacagtggatatagagaaacgagatattttggaggggaatggcaaggctgggtgattagctggataatagatgaaaataaatgctttagaaactggaaaatacttagggcaagaggaatataggatccgaaacctcactgtggtctacttagcaacataattttaggcatgtaaatctggagaccctttcctttgctctcaagttaaatacaacagtcacataatgagcacagtacttagtattttctgtaatttatatccttatttgaaaggtaattttcattccttcttgaacttaaaagacttctgagaaaggtgtttctgaggttgtccatttaggtctgaaataacagaacaagataaagggggaaaaacatgtatctctgataatccatgggacttatattcttattctagaactcttcattgcagtgaacacatgaaaccaacttggagttttattcctgtttcaagtaaatccacttaaaatagcatctgcataaacaaatgaaataaactatccaggactgtgacagcaattgactggaatcagcgtctggtgtattttcttataataaagaccaagaaaaccttacagaaaatataaatatgaaacaaggcccctaaaaaacttaactattctttaattaagtttgtatgaaacgaaaacaattcagctattaacacttaaaacactctggtatgttaagttggagtatttcccatcatgttgtaaaagcacgttacataaccttgctacgtgttccttgtctgaatagtaggaaaatacctattgctatggaccaaatgtggtttatttaaaaacaaagcataggggctgggcgcagtggctcatgcctgtaatcccagcactttgggaggccgaggtgggcaaatcacgaggtcaagagatcgagaccatcctggccaacacggtgaaaccccatctctactaaaaatacaaaaattagctgggcatggtggcatgcgcctgtagtcccagctactagggaggctgaggcaggagaaacgcttgagcccgggaggcagaggttacagtgagccgagatcacgccactgcacaccagcctggcgacagagtgagactccgtctcaaaaaataaaataaaataaataaaataaagcatagcaaagaggttaaaagaacctcttcagtgaaagtaacttggaaaactatgattttgattggctgggtgtttgggtggatggatggatggatgaatggatggatggatggatggatgcatggatagatggatgaagggttgctattgataagagaaggtagatggtgctgactaaaggaagtttttttagtataattttcatcctggaacttaggtatatgtggcaaaatttggcaacaccttgttgctatccaagagttggtgatttaggaagcatccaagcctttgtttcttcaaagtttacttctactcatggctacagcatgattagcaataccttctatgggcatgctagtagacccagcagttcaagcctgcaggtctctgggcataaaacaggtcacatagtgtttaggccatccctcagtgactcttttagattgttgtgtggtgctaataagatagtgttttcctaatattagtaagtaaataaataccaaaaaatataggtcacatgtctcttcaactgtaacatccagattgtatattgattaaattagaagactagaacaatgaaataatgtatcctgaacaacctggttttagtagctgaaagtctgcaattgtgtaagttctatacagcttaggaaatcgaagaatatagtactttagaaaaaacatttatgcacatttgtagttaattattttaataaacatttttgaaagttgcagtaggctggggtattgagatttaaaaacaaacaaacaacaacaaaaaaaacagccttcctcctcatggagctcacagctatgagggagaaaaatgcagatacgtaattgcaaaacagtgtaatgaaggctgatagatgtatcagagcatgacctggcataattcatttccccagggccatgacagaaggcttcctacatgagagtccttaaaattctcattattttggatccttttatagtgttctttaactgcataaaataaattttataaaagtacaaagcaactcaattatattgaaatacaggtgccagaatacttttaaaaataaacttgttatataaaagtacaaggcaaatcaattatattgaaatacagttgccagaatactttaaaaaataaagttattaaatagtaatgtatgtacttctttattaacacattaagtaacaaatatagccgcaagtctaataccatagtttcaacaccatagtgaatgtaaatggtatttggagatttctgcaactaccttaatgggatatgaaaatatgtgacttctgttgttgccagtagtttactgcctaccttcctaactgaaggaaatgctaaatttcagtaaaaggttaatgaaatagagatgtaattttcttttcatccaagtttacaggccccatattaaggacccgtcacagaggagggagcttgatctgatttttcaatggtgagttggagtttctcagaccaatgaaaatggagaagccacccaggcatgacagcgaactgtgcaaaagcggaaaacagatttgcccttcaagaaaattataaagcttgatactgctggagaaagggccaccaggcacaggatgatgcagaaggagaggaaaggccttggatactaggtcaaggcttgagtgaggaagggaagccagtcaacagcatcaagcaaggagggtaccatgatcaaagctgagctttacaaagagttttctgtgtgagttttgggatatagattggagggagaagagtctggcagccccagagagagattgtgagagtctgagattatctcatgatggtaagcatgaagacaaagctatttttggaaatattacaaataaatgttaaaggcaaagtatgagggaaaaggcgtttgggcaggcagttcaattttatgaatactcagtgccgattatgtggccccagccaatatacctagcaggatggagggggcataattctaagcaggctttttattttaaaataataatagtttctgttaactaagctcttacaatattcaagtattattcatattctttttgaatattacctattacccttaaactttcctgaggaagatactgttattattattattattatccaattttacagataagaaaactaaggatcagacggattatatcatttgcctaaagtgatgtaactggtatgttgcagagccattttgttctgtccacctgcctcccttagtcaagctaatggcctttatttttttttttgcttatgtcaatactatccaaagcctgtgaatattgtaggaaatgctaagtatcagttacccaagaagcaaagagaagagttttaagcccctcatattgaagggctaggtatttaaacactaggattttattttaacaaaatactgccctgaaaatcaagtaccaaatgatgaaaatcactaaaacaagagtttttaatgaaattttaccctcactacacatgccatttaattgaactaacataaaactctttcagaggtatttagtggccaaagttccttatgtaacataaatgaaattctgggttgctgcacagattcctaaacagatatagattatgggattattttctttaaatttacttctgatcacttcaccttctcagcaacccagatactggcaaagtggaagatagcttgatgaaacaccaggctgtagcagtctgactaaagcttttacagatttctaggaaaattacttaacaaaaaaaaaaagaaagaaagaaaaggaaggaaggaaggaagaaaggaaggaaaaagagaaagaaagaaagaaaagaaaagaaaggagaaaaaaatgttgcccagcttagaagtgagaggactaggtttccaaatccctgctttaagaccttgtcacaattaggagcaattccctttttttctcccaggcttatttttgattttttttttaaagagtgttagaattttggggaccctgagaaatctgtcataaagatagtatatcataaccactgttatctttccaaagtattgccaaacagcacttagatcacccacagtggttcagccttctgctagtaagatgagatgcctttattttccacaaaggatatcaagccctgaaccccacccagagagcaaagaagacacagaggtagttgcttgcaagtcaacaccattctttgtgagcgtaactaggcaatggctttgttactggtggaggatcttgaatatgagttgtccaggttcttggcgttttgagcaaagaattggacaaaacatacaaacaaagcaatgaaggaatgaaacaacaaaagcacagatttactgaaacaaaagtaaactccacagaatgggagcagactcaagcaagcgactcaagagcattggttacagaattttctgggtttaaatactctctagaggtttcccattggctatttagtttacaccctatgtgaatgaaggagtggcccacaaccagtctaattcgtctcggaaggctaccaatcagaggctgatgttacaaagttataccgctatgcaaatgaagacgaggtcacaaccaatctgattggtttcaggagaggaccaatcagaggtactttccatttttcatctgcaatgcagaaagggtggaggttacaaagggagtagcctctgatccttttgttccttgagcgtggaaagttggggttttccttttgatttagttctagaagtcagcatgaatcagccttaggttccctgcctccagaccctattcttcttcttcacctagatattctaaccttttgttaccttccaagaaaaaatgattggtactagcaatgggcagccacaggtttgttatcttctgtgagtcatgatcaatgaacaagtcctctttattctctaagcaatgctaaaacactaagcaaaccagtaatttcttgacagatttgtcacaggaattttgtaagcactttacatttgttacactgtagaaagtacatgtggattttagtcttacaactgattacagtcataatttgtgtggcagtgtttagacaactttaggcccataaagggaaatctgaccagcatttctcagaacaataccagagacgggtccatctttatttctcccttatggactcagtttgaaaacacggattcatgtgactggatgtctgatcaagatgctgttatttaccatgctagttattttatacaaacctcataacaagcagtattagataattagaaatcactttatgcatcttaaccttacccagcctcacacacacctgtgttttagtcctttctaaaccacaaatcccctgcaactgaaaatgattccataacattttccaacattgcattgttctgtgatgatagggtataaaagatatataagacattgttcccatcctcagagaagtttcagtttgtacaaaagaaatacacacaattgcctattatttatattttagcacaagggaaaataatctcatttttaaaaattcttgacacagggaaatagatggaaaataaattttgaaaacttatttttaaaccatgtaggagtacttaatttgcagtgatcaatgactcaaagctcagcatgtcttaaatattccatattgctaagcagctgataatacaaatccatccttcattccgctgcttttctcttgatgtatctagcataattggtgttttcctatgtgtgtatctgaattgcatatttcacagttactgtagaaacctattactccttggcatttagcatggatgataatgttgctccttcagtaattttagcctagaccaaacatttttgaaatggtgttgtacattagggccatcttgcttatagattaataaaatcactaacctttacactaaaaaaagtgcactgctcatttttaataattatcaatatataaagttattgtcagttaagagtcagaatgcattttttaattctcattcttccttttgtttttcttcagcctaatatgatttttatgtcataaatccattctcattagtcttcacaaacagaaaagttatttcataagaagaactgagtagcgtttttctaatttgtccattttggaaacaaatgaaatatttattttaactgattagtgtttctataaacatttaactttggctggacacggtgactcatgcctgtaatctcagcactttgtgaggccaaggcaggtggatcatctgaggtcgggagttcgagaccagcctggccaacatagtgaaaccccatctctactaaagatacaaaaattagctggatgtggtggcgcacacctgtaatcccagctactcaggaggctgaggcaagagaattgcttgaacccaggaggtagaggttgcagtgagctgaaatcgcaccactgcactgcagcctaggcaacaaagcaagactccatctcaaaaaaaaaaaaaaattaactttgtggggcctaaatattcagctcttcctgatatttcatttttatcattgtaaaatggatacattattatggcgatagatatcttcacaaaaattccgtgtgatataataaacatttgaaattgaatatagttattcacttcctaaaacaacaaatcttggcctgtgtaatcaaatttggcaagaatatattatcatccttattcatatatgttttacaattatgtgttgtgctatagctaaacacataagtaaatatcaataaatgaatgtgtaaatttttggcaattaccgtatactaatgttggcacagatacaattattgttaactttattttcatgttcatataacttaagtgtgtatgttttggcttgctatatatgactagagtaaaattcagaaacctaagcatcctaagttagtattattgcttgttatagctggaatttcagtgtatactaaagtgatcttcttttcttatgcaaactaacaatgagtgccatggctcagttcaactgcagagcaattacaagaggagttaatgctatactttctttatatttatctttttaatatccggaggctgccttattttacttaatacctagattgttgaaaaatatatcaatacaatagaaaaactcataatttttaaaactcactcatctaattatgcattaaagtactaactccttttcggttccagtagctacttatggacaaatccactgactcctttattattgtggaaggcttcccaaggctgaggagaaaggagttggttggagtcaagcaggccaaagcagggaacatgacattgcagaaagagggatagcatgtgtgcagaagaaagagagagcttaactacaatttgagttgccttttcaagaaaaatgaggaaagacacagaatccatagattttaaaccataggattaaagtaaaattatatacactaataacaaaaacagaagaagaaacaatattaccctgaaagagtattttaaaaaacaacaacagagctttgaaatctcaccagaaaaaaaagaagggagtagccatataatgcaaaaagtaaggtaggatttttatgaccttgaaatattaaagccttaaaagacagagacaacaaattgaacaaatactagaaaaggctaagaaatctacacataaatgaaactcaaataaacatgaatctatgagattccaagagagacaaacttggtaattatcctgtcagagagaaattggagcaacagaaattgtagcactaaacaaagaagcttaactgctcagttactctataaggaagagtcacaaaggaacaatttaccacctcagtcagagaagcactgagttaagatagaggcagtcatgagcacctcaataaacagcctcacaaagcaaaacaaccttgacaagctagaaaagtcatcatccttgacattactgagcttctgtctcacaaataagaggcaggggtcagccattcttcagtgggtgagattaatgggatgaagcattaactctgagacttttaggtcacctttcatgctgtccaagtaacttggaggaaccagtgtgctcgctaaatgctgcattcaccaatgcacattgagtcactgggagaatcagcattaccaatttgcaatcatatatatacagatactgttagggactctttcccacttgtttttctttttttgaatttttttttaaatctttattttaggttttgtggtacatgtgaaggtttgttatatagacaaacatgtcacaggggcttgttgtacatattattacatctcccaggtattaagctcagtacccaatagttatcttttttgttcctctccctcctcccaccctccctgctcaagtagaccccagtgtctgttgtttccttctttgtgttcataagttcttatcatttagctcccacttataagtgagaccatgtggtatttggttttctgttcctgtgttagtttgctaaggatgatagcctccagctccatccatgttcctgcaaaagatgtgatctcgtccttttttatggatgcataatattccctggtgtatatgtaccacattttctttatccagtctttcattgaagggcatttatgttgagtccatgtctttgctattgtggatagtggtacaatgaacattcccatgcatgtgtctttatggtagaatgctttacattcctctgcatatatacctagaaatgggagctgggtcaaatggtagttctgcttttagctctttgaggaattgccatactgctttccacaatgggtgaattagtttacactcctaccaacagtatattagcattcccttttctccacaacctcaccagcatctgttattttttaactttttaataatagccattctgactggtgtgagatggtttctcattgtggttttgatttgcatttctctaatgattagtgatatggaatttttttcatatgctccttggctgcacgtatgtcatcttttgagaggtgtctgttcatgtcctttgtccactttttaatggggttgtttttcttttgtaaatttgctaagttccttataaatgctggatattagacctttgtcagatgcatagtttgtaaatgttttttcacattctgtaggttgtctgtttactctgttgatagtttcttttgctgtgtgcaagcttttaggtttaattagatcccacttgtcaatttttgtttttgttgcaattggttttggtatctttgtcatgaaatctttacctgttcttaggtccaggatggtattgcctaggttgtcttccagggttttcagagctttgactttcccacttttcattctttcatttggcacacattactgaatgctaaccatgcaccaggtactgcatttgtgccaggtgttaaggaaacaaagcatgagatatagcctctcatcagaagtaggaaatatcttaggtttttatttacattttgaacccgtacacaagtatatatttagagagatgttggagacttgggtagacttgctttttcagaatatattcaaaaataagccaaaatattttttaagcatttgaaaaaaatacttgtaccacttggaatcatggtaggctgtatattacagaagaacccaaaataacagtggcttaagcaaggaagaagtctttctctctctctgtcatgtgaaataaactcaagggtaaggagttggggaccaatgtgctacatctagtatcatcaggcatccaggctcctatccttttactgtacccatacaaatgtctttcataagttcaccacatgggccagggtggctgcaggagttctaccagcatagcattcctgtgaagcaagccagaaggaaaggcagaaagagcagctcttcccagctgaatcagctccctttgaagtcttcctgaaatcccatgcaatacttctcattggacagaattaatcccttggccatatctagttgtaatgtgaactgggaaatgtattcttttgtctagcagtcgggaggagggaggtggagccacaatgtgcccagttaggaatcacatttctcttaaaaaggaggagggaagaatgaatgtagggataggccactagcaatctttgctacaacagtacagctaggggatatgttaattttatgagacatttatgagtggttctgcttgacagcaggaagtacaaatcaatggaccaaatagggattcacctactttcacgatttagttctctctgtgctcattagaagtctaaagtcaactttgcaggtgacaagaaatgtggttgtcttaaatatttaactctagctttgcaaagtaaaaggaatcattaatatctctttcatttgtcctgtttccttggcctttgaaaccagtgaaacagctaccttttgttgtgtttgttcaaaatgagtgatctgaacaaatgagtgatttccttatcttttcaaaaagaatggtcacagtatctgccatttattatatagttaacattgtgtggatcactttactaagagctttgcatggattctcttttatccttcagaaagactgagatagatgctattattttccccattttaccagtgacactgaggcttaaacaaattaagtgaggctgggcattgtggctcatgcctataatcccagcattttaggaggccgaggccagtggatcttttgagcctaggagttcaagagcagcctgggcaacgtggcaaaatcccatttctccaaaaatacaaaaaattagccacacatgttggtatgtgcctgtagactcagctactcaggaggctgaggcaggaggaacacttgagcctggaaggcagaagttgaagtaacctgagattgcaccactgcacccaccctgggtgacagagtgagatgctgtctaaaaataaaaatgaagaagttaagtgaattttagaagatcatatggtttagcggacagcagaaccatgctttaactgagaaagatctttctctagaattcagcccttaaccactaccctcttcattttgaaatttaccaattaaaatgtgatgctcctattgtccaagggagggtgtaatgtaccctttgggagtggacagtaattccttatggtcaaaggtgaataatacctataaaatacctatgttgatatactttaaagtattcaccaccttggtttttctagagcagaacaatgatcttatctatatggttctgaatgtgagcatagttgaatattctaagatgaattgttgattttattttgttttgtttgggcaattgtttttaaggcctctgttacacaggtagatgaacatgagaaaaatcattgaagacaagaagcaaatacagatgagcacttacaaagtaataccctttaggcaaattggagtatatctgtacaatcatatgagaaaatgaagtccattttgaaagctgttcttttctaagcctcctcctttagttagtgagatgaattatccatgtgaacctgaattttccttgaagaaaaggaccactgtgtgctaacattggtattttgacccaccccaacaccacttccctaattcctattggtttcattcaccttgatttaattttatgaaattttgtcagtacagtagggtctagttgtgagagcaaatgattacacagagttgctggcatcagaggacatgatgctatctagggggatgccttcaagctatctcatttcgtctgtgtcacacaacacaacttccaaccaaatgtcattctggggctccaggggctgattgtttctttcacccttcagtaaaaactcactttgtcctccacattcacacatatagtttttcatgaaaatcagaaaaccttctaaccaactatgcaagaactgagaaggaaagcactgtaagttaaaatgtgtttcttcctttgattatgttgtccctgtttgaaacacttataatatgataagcctaatgccaagtgttatagtgtttgacaaaaaatgtaaaacagatttggttaccaaggttctttcttggtgcataggaagatacttgggtaacagatacagaatcattaattactgaagcaaaatagcacaaatgggtcccaaaaagagagtcaattttaagaagtatttcctcagatgcagaaaaaatatagagtgctcactttaaaataacctaacctatattttatatcaacataaagaaaatatattaaaggcaacgtgactgcccatcacaaagaatgcagatactagatattcaaatttcaagttgtgataccccaaacagtaaaaagtaattagttttggataaaagttcttatttctaaatttataacttataaattatttttaactttatcaagtggtcactttaatttttctttttattttaaaagtcatgaatttccattagtccatattaaaaactgcatagtctcttaaattcaattgatctaaaaatgagtatttctaaagcgtattctgttggagacagaatccttgtaatatttcaagcaaaaattaactacttaagaaactaagtaaatttttctttctttaggtatttctttatctttattttaatttgtcagatgagggaagaatataatttccaaaatccatgaaaagctcagactgagttgagtagagaccccacttgcttctttcagtccacttgaagtagcattgaaagctgagtgtatgactataaatccagttgtgtttaaatgagtttgatcttcatggatactaaatacaaaacactttagtcacagatacctcactttcttgattaattatttatattttatatgttatgaatgctttcttttctaaaaagaacactgagttgcttttgaacttttattttcgaactctgaaaagtttatactaaaaattagggaatatttatgggtatgctactaggtatggaaggatatttatgagcctcttagtataagaactttatcgttacattttaaaatagtacaattctaattaaagaatatgtacctcagtgcagtgcttacattaaactttgactccatagctgttactatgaccctaaactgtgaagttaaaggactgtctatctaccctatgccttgaaatttttaaaagttctcaataagtagaaaagctagtgttaggagtactatttagaaatcagcacctgttatcaggtaacacaactagttaactatattggaaggaggcatgtgtgttgcacagctttttagggacacatcaatgtttatacaaatatgaagagagaaagtaaggcttatgtaaaggagttttcagacagtaatgatgagccccaagcaaaactgtgttcttaccttatttttatttatcctttttggtaaagctctatgacctacgtgtggagtgtgtcaccaatataatgatcagtttgtaatgctttggggggaaaaaagcatactgataacttaagacatgtgccagtaatcatatactatagctcagaaccaggatgatatagaaataagttgagctggtatagcagccaggataggataggcattactaatattaaaaaacaataacaaaatctttgtggtttaaagcaacaaacaactctgcttatatctcagatatccaaagtaatagagcctccaccattctgggatgccacctctcacttcaaggcttcaagatttatcacagaggtgaagcatagagctggagagttgagcactagcaataaatgctttggcctacaactattatttcatactctcattgtatggccacatctagtcacttggctacccctaacttcatataaggaattgtattataattctctatctaccttgaaatggagggcaagtagatattggtgaacattatttatatctttcacaatgtatttgctgatttatttggggccaagattccctattattctttctgcaaaaggccatataaaattttcattctgctggctggatcactactgtaagaagtattaatgacagataggcttgtcttagaaaacatcttctcctttggtgatgcccattaaaaatgataaaattcttcaattaacaatttctagcactgatttggaaaacctgactcattctgtaccagtatcattggtcaaagatcaagtacgaaaaagtgtgcacaaacgagtctgtcagtttttcagaaagttaatataaatatcatatgtatagttatatgacccagcaattccacccttgggcatatacccaagagaactgaaagcacgtatctactcaaaatcttctacacaaatgttcatagcaacagttttttttataaaacagcgaaaaaacgtagaaataacccaaataccccatcagctgacaaatagatacatgaagtgtgatatatcctacagtggaatattgtataactgtaaaaaacatgaactactgacaaatgctataatatggctgaaccacaaaaacatgctgggtgaaagaggccagaaacaacagagcacattgtataattacattgatataaaatgtccagaatagcaaatccatagagacaaagagtagattcgtggttgccagggggtgatgaaaagtgggaattgggaagtaaaggatttattcttgagcaatgaaaatgttccggaattggatagtggtgatgcttgtagaactctgaattattgaaatttactaaactgcaagctttaacattgttaaaatggtaaattttatatgaattttatctcagtaaaaaatttttaaaaatatgtgctatagtgagtgatcaccacttttccacgtagaactttctgcctccattttactggggagtgtaaccattgcctcctactgtatcttcacaagacaatacaagtttccaaatctatcagagtgtcacatgttagtcactatgctgatcagttttctcaatggcataactttacatttcaacaaactaaaggctgagtagaaaaaatatctgatttgaagtcagagaacctttattagagacatgagcaagtctcttagctttccaagctttgttttcttcatctgtgaaacaggaatgctcctgcatacttcaccaggataccggaaaagaccagatggtacaatatatgttaaagtactttctgtatttctaatctggtcttctacttttagttttagcttattttctttatattgttcagcctgctttcctttaaataaacttcctgtaaaaatctgaacattggaagtcaacatccttaggttggaaccccagctctgccacatttcagttatgtgaccttgcttaggtagttgaacctctgtaaatctgaggtttttctgtaaaaagggaaataaaaagcctccctcatgatgccaatgtaagaattaaatgagaacatgtaattatttagtatagcctctttgcatggtaaactgtctgtgatattagcacaataaggctcatgataaaattcaccctcaaaaatcttcatagctacaaatactagtcgacttacttggtctgtttgcaaacctaagaatttcagtctcttaagtattccttctaatttttctattctgtctcttcaataatgaataatgtatattgtcaccagagaagattagttactgtttttttctctgaaaaaagcatgttgcacactaattagattatatttgtatgtgttgattatatacaaattatatgcaaatctgattttactctgaaaagtatcaagactgaaaaagttatttatacatgtatgtatatatattatgcacacatttatttacctatatacacatatgtatatgtatatagatatacatttatatacatgttatcttacacatgcaaaattacaattgaggtttttaactatgttgatcaaacattcattcagtgtaacagaaaaacacttaacccccactggagttgacagatttggcaaatacagctctctttttcttccttctccattagagagttcattggtgcattttgttcagatgaaatgcaagaaccaacccaataattcattaaaaggattagacaatcagttgctagaaattccggcctaaaataccaatatatgttaaatcgcaaaagcaaagaaaaaccattctggctactaggctaaattgctgcctttaacagtgctagagccaaatgctcaatctgggcaggagcctggttgcttttaaacagtagacctcactactataaaattttttgcatctaactcaggagtcagttgaatcttagcctcaacgtgtaaggggaagaggtgagaaatatgactcttttacagagttccagatggtcatgtatggatttggtctgagagccgtgaattgtaaggaacaattcatggtgtgattcaagcttcaatcttgttatcttcatggactgaaatggagaacgaggtgtctgatggaactacagagaaagggaactaccaaatcttctatcaatataagtgacattcattcatctcattacttactcaacaggtatttattgagcacttatgtatcaggcaacatggaaatctctaggaataaaagctgtacagggtcttgagaaggtcacaatgcagtaagggaaagcaaacacagcatgaagctgttaagaaatcatggaatgcatgataataatatgagcgttttgtgatactctgacagtatagtgatgcctctgattctgctggggtcaggaagttgcatagaggaacatgagtcttgaagcaaaggaagtataggaaagataaggtggaaagtaacatccagagaaaacaatatgaggaaaagcatgagagcatgtcatattctaaatcctgcagtctctttggactggctagcacccacggcacctatggagaaatggcaagtagagacaggcaagatgggcaggggctaaatgatgccataaaaggagtatgattttcatcctataggcaatgggaagctctttaggatttaaaaagcagagaaatctgatcaggttagatttgaggcagtgtagagagtggagtggacagagtctagaagcaggcccctttagaagactattggaagagcccagctgagagatggctgggataagaatggagagtacaaggctgggcgtggtggctggccaacatggtgaaaccccaactctactaataatacaaaaattagccaggcatggttgcacgtgcctgtaatcccagctactcaggaagctgaggcaggaaaatcgcttaaacccaggaggcggaggttgcagtgagccaagatcacaccattgcactccagcctgggtgacagagtgagactctgtctcaaaaacaaaacaaaacaaaaaaaaagaatggagagtacaggaactatacatgcttgagacatagaattgatagaactggtagctatttaaatatgaatgttctgcaatcatgctcaggtttttagattgggagacacaaaaggaacaataggtttggcaagaaagccaaagattgagctttaggttgttgagtttgagacacttggaaaacatccagataactgggcaattggaagtgtagttctggcacttagagaagagaaacaaaggaaagaaagaggtcatgggggctcagtgtattggttatagcaatggtcatgtaaagttgatatttcccagcaaagcaatgaaagtagatggcccagaacagaagcaaaggagaaagaaaagatgaagatgccactatctgagaggtgggagaaacaaagggaatagtgtcaagcagcacaagggatgagaacattgtaggaaagagggaaaatttttagaaaatcttatcaccaaatgataatagtatgttggaaaagtgctccgagttacccatgagacaaccaccagcaatctctgggagagcagctttaatagagtggagaggataatttgcttcatgaaattagtaccagtaggcccctagccttttaaacttgtttccaactatttactcacgtgtctaagatttttttttattctcatgagtttcctacttacatggttaaacagggagaggaaatcaaccgacatctatgctctggcagggaaagaaggcaggtgttccagagttgttttcagtactgatataggaatctgtccttcacgaggctccaagcaaggcatggagtcgctgtcccgactggtagtggcggtgttctctggtaaaccagattccaagtcacctgctgaagctggtgagagcagtgaggaaggggatagtagagtatggaagtttgggaatagctgttaggggaaagagagtgacattattgcacaaaataggtgtcaattcatgcataaagaaggagtgagtgagcacaattacctgcagaaaatgaaattggacctgtggccatggatcattcctacatctgtgtttgccaccattgattttctgaaatttagggcattctagagacaggcattttaagatcaaacactgttcttagtgctccatctcattgagtttaatgagacatacttaaaaacaaatggaccgttttgcagagggctgagttcacacccagcttcacagagtagaaactaaaaatgttctaaattaactcaaatcaatttttaaaagattttctgagctgagagcacatttggccaagaccctgggtgccacgtgaaacatataaacgattgattgaatgaaaataggccatcctttctcttccttagacactaagcagccttttgtcctgctcttttttactttaattggaagcatttttaggttttagagccagttttgttctaaatatatgaatacttacttttcccctttctgaaaagtcagagattttctccctttcttttttttttttttaatttatttttttttattatactttaagttttagggtacatgtgcacattgtgcaggttagttacatatgtatacatgtgccatgctggtgcgctgcacccactaactcgtcatctagcattaggtatatctcccaatgctatccctcccccctccccccaccccaccacagtccccagagtgtgatattccccttcctgtgtccatgtgatctcattgttcagttcccacctacgagtgagaatatgcggtgtttggttttttgatcttgcgacagtttactgagaatgatgatttccaatttcatccatgtccctacaaaggacatgaactcatccttttttatggctgcgtagtattccatggtgtatatgtgccacattttcttaatccagtctatgattgttggacatttgggttggttccaagtctttgctattgtgaataatgccacaataaatatatgtgtgcatgtgtctttatagcagcatgatttatagtcatttgggtatatacccagtaatgggatggctgggtcaaatggtatttctagttctagatccctgaggaatcgccacactgacttccacaatggttgaactagtttacagtcccaccaacagtgtaaaagtgtttctatttctccacatcctctccagcacctgttgtttcctgactttttaatgattgccattctaactggtgtgagatggtatctcagagtggttttgatttgcatttctctgatggccagtgatgatgagcattttttcatgtgttttttggttgtataaatgtcttcttttgagaagtgtctgttcatgtccttcgcccactttttgatggggttgtttgtttttttcttgtaaatttgttggagttcattgtagattctggatattagccctttgtcagatgagtaggttgtgaaaattttctcccattttgtaggttgcctgttcactctgatggtagtttcttttgctgtgcagaagctctttagtttaattagatcccatttgtcaattttgtcttttgttgccattgcttttggtgttttggacatgaagtccttgcccatgcctatgtcctgaatggtaatgcctaggttttcttctagggtttttatggttttaggtctaacgtttaagtctttaatccatcttgaattgatttttgtataaggtgtaaggaagggatccagtttcagcttcctacatatggctagccagttttcccagcaccatttattaaatagggaatcctttccccattgcttgtttttctcagctttctcaaagatcagatagttgtaggtatgtggcattatttctgagggctctgttctgttccattgatctatatctctgttttggtaccagtaccatgctgttttggttactgtagccttgtagtatagtttgaagtcaggtagtgtgatgcctccagctttgttcttttggcttaggattgacttggcgatgcgggctcttttttggttccatatgaactttaaagtagttttttccaattctgtgaagaaagtcattggtagcttgatggggatggcattgaatctgtaaattaccttgggcagtatggccattttcacgatattgattcttcctacccatgagcatggaatgttcttccatttgtttgtatcctcttttatttccttgagcagtggtttgtagttctccttgaagaggtgcttcacatcccttgtaagttggattcctaggtattttattctctttgaagcaattgtgaatgggagttcactcatgatttggctctctgtttgtctgttgttggtgtataagaatgcttgtgatttttgtacattgattttgtatcctgagactttgctgaagttgcttatcagcttaaggagattttgggctgagacaatggggttttctagatatacaatcatatcgtctgcaaacagggacaatttgacttcctcttttcctaattgaataccctttatttccttctcctgcctaattgccctggccagaacttccaacactatgttgaataggagtggtgagagagggcatccctgtcttatgccgattttctccctttctgaaaagaaaggctagagattgaaaagttaaatatttcttctctgcagctagtaagaaaagaaccatttggttctaactgtacttgcctggactctaatttcctctatttgagtttctaatatatctgcattcagttcccccagcactcacatcccacagtagaggagcatcattggctattgtctaatttccccaagggaaaggtgtctacaattgagaaaaatagtctgaattccaggcacacttatttactacaaactctctaaatattgtaatgtccttttactatgaaattttgcaggctgtgatttcaaagagagctctttctttctctggcttttctgtgtgggcctcaacgaaactggcccttgctgctgttgttgctttctgaaagtgagttatcaaaattactaaccaattccattttgggtgttaatcaaatatttgtggctttcaccacgtggcaatttaaaaaccaggctcagcttaaaataccctttgacaattggttttgccttctttttatttcattctgaaaatgactaatatatttacgtcaattcatctaccccctaaaattattttccataaaccaagtacaaactagcatatgaacctacaagaatgccttgatttctagagctgttgtgcattggttaattcaataaatatatattggtgatccaccctgcagggggctgcatgctgttctacagatacagagttggtaagcatggccttatcccttgggtgctcagaatctattttgcttaccagtcagtaaagagcattgtatgttacaatgagggccatctccatcagctttactaaatgtggattagcctgaaatttaaactgtgtatcaataaggagaactccattttatttaattcattccgcaattccttttataaagcatagtccttatgtaaatatcttcatattcatttctcttataaatgtaaagtttcttaatgtagagcatacctataatttctgcccttgaaattagtatgtaagagtaaatgtttgtgagaagttgcagcattctaataggtttttacactgttaaggtttgtgtgaatttagggttagatcataggtatttctgtctttttctttcatgtacaatcttagaactgggtggattgttagacaatgtgtgctcttgagatagaaaactttgaagtctagaatttagaccttagtccaggtcacactgtggaaggggacaaataggcctaatatctgcttttcaccaaaatagaccaaaagaaaagattttagtctatgcttagagtattcttatgagcattgactttgtgccaatgtatttaaattctcagtttttatatttagaaaaccttaccgaaattcatcaggccacgttcaagaaaggcttaaagagcaaatcttgagtgaaaaatgtaatagccattcctagaagttgttcctttttaaaaatgccattgttaaagctgtcgttataatacatgctctctgtaaaaggtcaattagcagattccccaggatatttaaagttttgtgccaccttctaaatgtcaagttgaagttgggaatcttgtaatatttggaagaattttgccataaaatagtctatatgatgaaaaaacaattccaggtcaaggatgaaagagtggtaggaaatcttgtctttcctccagaagacagaggcagataagggcttagtccagattagcacaaatacagttcccacaccgagccccactccttggaatggaaaggaaattgaacactttttgatacttgacctcctttccctgaacgaaatggtatggaggggcagtatggagtagcagaaggaatagtttttcatgcttttttaataaaagaaaggctttacgcctgcacatacactatggagtatgttttgggagagatttgaaaggataaagggaagaaaataactagtgagacttggtgttggtcctggttatggccagagaaatgaaattaaaagtttggtccatgacttggaacacttgttttcagagcctggaggaaaagaggtgaggacagatatggatgtagaaatctttgtttctgagtttaaatgtgagaaaattcatgcctagtcccttcagttttttgctgagaagatgtaagggagaaaaaataatatctttttttgacctatctcaagagtcataatgggcattactgtaacaaaagagagattaacaagagaaaagcataacaaatgtatttaaccaaagttttatgtgacacagccttcaggcatgaagattgcacccagggaaaactatatatttttatgaacagttgttggaaataagagtggagaacaaaagggtacgatctaatagtaataacctgggaagaactcagtgaggcctgtttgttcagattcttcttggcctctggatatagagaaggaaccctatagactgagggtcttacgacctactttcggaggatgtaggtcagagattttttttttttttttttttttatgaccatgcttcagaggcaaaagtgtggaaaagattagggtgtgagctccaaggtgccatattatggagcagcatgttctgagccccaacaaagacaaggccatcttctaagaaatttgtggaggaataaggattgagatttgaagagaattgtgggtgtttgggaaatctatctattattggggacaggaaaagtttcctggcaacagtgagtatccagccaaggttgaaaactttgaatgtgtatttgtatcaatatgcctggttgtgttatttctctgccagtacagaatagtctagaggttgaaaagtgttcagaaagagccaaacatgaagttctgcagggtggctttaatagagaaacctaaatatgaagacattgaggatctggtgagagtggttagaaggattcacatgaaggttccatagagagggaagcagagccatggagtgagtgagagatcagtggggaatgaatgttgaaggtctctttgaggtagcagagcagttgttcttggagtaaggaagttagggaatttaaaaaaagggcgaaatatctccacaggggatctatataggtgttctagattagggatcagcaaactttaaaagggccagataggaaatattttcagctttgcaggccatatcatttttgttacaacttctcagctctgtccttaaagcatgaaggcagtcataaacaataagtaaagaaatggacatggctgtgtttctgtaaaccttttttacagagtaagtggtacgccagatttttctcaacagttgtagtttgctgatgccaggtcatagatgataataatttccaggatgtggataaatgtaagcagaagtaaagacttagaaatcagggggctaagaaactttaagatgtgtatattgactaaagccatctagatcaggatttttgagaatccgtttgaggctggtgatcatgaattatagaagagctactcatctgctctatagtgtgactccttcagctacatttggctgtgtggctgaagtcacagataaggcaaatgtttgcattcatatagggctaggatttttaccagatgggtataatggaatgatagaggagaagggaaattcaggatattgaaatgatgggaagtggtcagtaagctaaagaaaggagaaaactgataatagcaagtagaggggtcagttaactggtgatcatcaggaggtctaatacccaaatcagcttcacgagggcagtgactgttttattcactcacatgtcccagcacctagcatagtgtgtggcacatagtaggtcacaggaagatcatttaataagcaagcaggaaaagtgggaagttggggtcacgcttggatgagtggtggaggaagttatttgttatggatgacatctcatatgcctgaaatgcacacacaataagttctcagtaattattagcctttatcattatgctttttgaacttttctagggactacatattttcggagaaataaaattgagaataatttctctgcaaatgagtgagttgacctttcccaaatgagtatcatttaaggccattggaacaattagtattgttaaatttaacttcatatgggcagaatacaaaacaaaatactagtagaaattatctcctttccaaattagcctagtctggttctcaaagccagacactcagtgtacttacttctaaagccttcagttgtctagtttagtgtgcttatcaccagtgtggaaaattttatatttacattgctgaatcacctctcagtacatttgaatggcctctcttttgctttttgtctagggctgaagtgtcattcaaaaataggggtgactcaggaagagtttacaggagggagaaggctgaaatgataacaaatctaatttttaaaccatgccagttgtgttagtctgtttttgttgttataaaggaatacctgagactgggcaatttataaagaaaagaggattaattggctcatcgttctccaggctgcacaggaagcatggtgctgacatctgcttctggtgagggcatcaggaagcttatggtagaaggctaagggggaacagccacctcacatagtgaaagtgggagcaagagagagaagagggaggttccaggctctttttaacaaccagatctcatgtgaactgagtgagaattcactcatcaccaaggggatggcactaaaccattcatgagggatctttcccccatgattcaatacctcccaccaggccctacctccaactttggggattacaattcaagatgagatttggaaaggaccaacataaaaaccctatcaccagtgctttcatatttagttacatgaatcaaaaaagtgttttgattttgaacattaagaaatattctttcatatccttttcagacaacttgtatgtcttttggatgtctttttcagatgacctatttctcctttcacaacccatagtatcacgacttgtacacagtaaatatttaataagtctgtgctgactgatctttaatgacaacataagcagttctctgaaatgccctttgctctacctcttggcctggtaaatttattttatgattcggtttcaatgtcacatttaaaacggttcccagctctcatcgttaaaatgaatgggcccctgttccaggtagctcatacccagtttccattacattgtcgttgttcatctgtttctcattcttgccttttatctaccaaggagcagggagatttgggcttattcatctttagtatctctgataccttgcatgtgcttgccatctgtaaagtgctccagaattttctggcaaatgattgtgtgacagggagaaaactcattctataagcatgatgtaggctttagttggcaaaccctgccctctaaaggtttttgcttctttaaattttttctgcagttagaatactgctgtcaaatgagcaatgagtaactgattatgactttgtgatccaattagcagatgtgattaggggatggttagcctttgtttctatacctacttcttttaaattcagaataatccataattgatactcagtatatctttgctgaaagcacagatttcaccaagatgttaacaatggccatatttgagtagtagtatttttatttaactgttttctttagacataatgtttttcgttgtttgaattttctttttcaggatatgtattagaaaaaaaaactattttcattttttaaaatagatggtgtatgaggtagacaattgagagaaatgaatgctttgatgcaacttggaaccagtcagggctggatcacaatgaggcagtctacagtttggtaacaaatctcagtggtttaggaaagcaaaagtttatttgctccagattgatggggactcttctacattcagtctctcagatccaagcctccttcagctcaaagtgacttccaaagttgctgtggccaaaagagggagaaatcgaagagaccagccagctctcacctggctcagcgcatgtcactttccttggccaaaacaagtcccaaggccccaagcttactgcacaagagagtggaaaatgcagagaagcacatggaatccagtatatggtgagcaccagttgtctctgccaacatgacggtaactcttttcatttttcagttactgtaatgaatgtatgttggatccagactgcggtttctgctacaagatgaacaaatcaactgtcattgactcctcctgtgttccagttaataaagcatctacaaatgaggcagcctggggcaggtatatcactcattttaccatacgaatatataataatatttcaaaacgaggcttatgtttaagttttcagagtgcttgcacttatagcagttcttttaaactggccttcataactacattactttgcagcatatactggtgatagtggatgcaaagcattgcaattgtgtgtttcacacagagtagaaagcactcaggcctagacttttggagacccagatttctctaataaggtataggagtttggatctttagttttaggcagctattcacaaatactgccaaggcaatttctcccactgcatattgtttaattgcactgtatttccaaactcccaagcttttaaatgaaagaaaactgtaaagtcaaaatgaattactatcacgttaggttgggcacagtgcatcacgactgtaatcccagcactttgggaggctgaggcaggcagatcacttgaggtcaggagttcgagaccaccctggccaacatggtgaaaccccacctctacaaaaatacaaaaattagctgagagtggtggcacatgcctgtaatcccagctgctcaggaggctgaggcaggagaaaggagaatcacttgaacctgggagatagagattgcagtgagctgagatcaaaccactgcactccagcctagacaacagagcaagactctgcctcaaaaaaaagaaaaaaaa

SEQ ID NO: 14049 - DNA, 1026 bp, Homo sapiens
tcacaaatttcattttcacacttgtgggagtctggcttgttgagaaggtgggccgcagaaagcttacctttggtagtttagcaggtaccaccgtagcactcattattcttgccttgggatttgtgctatcagcccaagtttccccacgcatcacttttaagccaatagctccgtcaggtcagaacgccacttgcacaagatacagttactgtaatgaatgtatgttggatccagactgcggtttctgctacaagatgaacaaatcaactgtcattgactcctcctgtgttccagttaataaagcatctacaaatgaggcagcctggggcaggtatatcactcattttaccatacgaatatataataatatttcaaaacgaggcttatgtttaagttttcagagtgcttgcacttatagcagttcttttaaactggccttcataactacattactttgcagcatatactggtgatagtggatgcaaagcattgcaattgtgtgtttcacacagagtagaaagcactcaggcctagacttttggagacccagatttctctaataaggtataggagtttggatctttagttttaggcagctattcacaaatactgccaaggcaatttctcccactgcatattgtttaattgcactgtatttccaaactcccaagcttttaaatgaaagaaaactgtaaagtcaaaatgaattactatcacgttaggttgggcacagtgcatcacgactgtaatcccagcactttgggaggctgaggcaggcagatcacttgaggtcaggagttcgagaccaccctggccaacatggtgaaaccccacctctacaaaaatacaaaaattagctgagagtggtggcacatgcctgtaatcccagctgctcaggaggctgaggcaggagaaaggagaatcacttgaacctgggagatagagattgcagtgagctgagatcaaaccactgcactccagcctagacaacagagcaagactctgcctcaaaaaaaagaaaaaaaa

SEQ ID NO: 14050 - DNA, 5636 bp, Homo sapiens
gtgcattggttaattcaataaatatatattggtgatccaccctgcagggggctgcatgctgttctacagatacagagttggtaagcatggccttatcccttgggtgctcagaatctattttgcttaccagtcagtaaagagcattgtatgttacaatgagggccatctccatcagctttactaaatgtggattagcctgaaatttaaactgtgtatcaataaggagaactccattttatttaattcattccgcaattccttttataaagcatagtccttatgtaaatatcttcatattcatttctcttataaatgtaaagtttcttaatgtagagcatacctataatttctgcccttgaaattagtatgtaagagtaaatgtttgtgagaagttgcagcattctaataggtttttacactgttaaggtttgtgtgaatttagggttagatcataggtatttctgtctttttctttcatgtacaatcttagaactgggtggattgttagacaatgtgtgctcttgagatagaaaactttgaagtctagaatttagaccttagtccaggtcacactgtggaaggggacaaataggcctaatatctgcttttcaccaaaatagaccaaaagaaaagattttagtctatgcttagagtattcttatgagcattgactttgtgccaatgtatttaaattctcagtttttatatttagaaaaccttaccgaaattcatcaggccacgttcaagaaaggcttaaagagcaaatcttgagtgaaaaatgtaatagccattcctagaagttgttcctttttaaaaatgccattgttaaagctgtcgttataatacatgctctctgtaaaaggtcaattagcagattccccaggatatttaaagttttgtgccaccttctaaatgtcaagttgaagttgggaatcttgtaatatttggaagaattttgccataaaatagtctatatgatgaaaaaacaattccaggtcaaggatgaaagagtggtaggaaatcttgtctttcctccagaagacagaggcagataagggcttagtccagattagcacaaatacagttcccacaccgagccccactccttggaatggaaaggaaattgaacactttttgatacttgacctcctttccctgaacgaaatggtatggaggggcagtatggagtagcagaaggaatagtttttcatgcttttttaataaaagaaaggctttacgcctgcacatacactatggagtatgttttgggagagatttgaaaggataaagggaagaaaataactagtgagacttggtgttggtcctggttatggccagagaaatgaaattaaaagtttggtccatgacttggaacacttgttttcagagcctggaggaaaagaggtgaggacagatatggatgtagaaatctttgtttctgagtttaaatgtgagaaaattcatgcctagtcccttcagttttttgctgagaagatgtaagggagaaaaaataatatctttttttgacctatctcaagagtcataatgggcattactgtaacaaaagagagattaacaagagaaaagcataacaaatgtatttaaccaaagttttatgtgacacagccttcaggcatgaagattgcacccagggaaaactatatatttttatgaacagttgttggaaataagagtggagaacaaaagggtacgatctaatagtaataacctgggaagaactcagtgaggcctgtttgttcagattcttcttggcctctggatatagagaaggaaccctatagactgagggtcttacgacctactttcggaggatgtaggtcagagattttttttttttttttttttttatgaccatgcttcagaggcaaaagtgtggaaaagattagggtgtgagctccaaggtgccatattatggagcagcatgttctgagccccaacaaagacaaggccatcttctaagaaatttgtggaggaataaggattgagatttgaagagaattgtgggtgtttgggaaatctatctattattggggacaggaaaagtttcctggcaacagtgagtatccagccaaggttgaaaactttgaatgtgtatttgtatcaatatgcctggttgtgttatttctctgccagtacagaatagtctagaggttgaaaagtgttcagaaagagccaaacatgaagttctgcagggtggctttaatagagaaacctaaatatgaagacattgaggatctggtgagagtggttagaaggattcacatgaaggttccatagagagggaagcagagccatggagtgagtgagagatcagtggggaatgaatgttgaaggtctctttgaggtagcagagcagttgttcttggagtaaggaagttagggaatttaaaaaaagggcgaaatatctccacaggggatctatataggtgttctagattagggatcagcaaactttaaaagggccagataggaaatattttcagctttgcaggccatatcatttttgttacaacttctcagctctgtccttaaagcatgaaggcagtcataaacaataagtaaagaaatggacatggctgtgtttctgtaaaccttttttacagagtaagtggtacgccagatttttctcaacagttgtagtttgctgatgccaggtcatagatgataataatttccaggatgtggataaatgtaagcagaagtaaagacttagaaatcagggggctaagaaactttaagatgtgtatattgactaaagccatctagatcaggatttttgagaatccgtttgaggctggtgatcatgaattatagaagagctactcatctgctctatagtgtgactccttcagctacatttggctgtgtggctgaagtcacagataaggcaaatgtttgcattcatatagggctaggatttttaccagatgggtataatggaatgatagaggagaagggaaattcaggatattgaaatgatgggaagtggtcagtaagctaaagaaaggagaaaactgataatagcaagtagaggggtcagttaactggtgatcatcaggaggtctaatacccaaatcagcttcacgagggcagtgactgttttattcactcacatgtcccagcacctagcatagtgtgtggcacatagtaggtcacaggaagatcatttaataagcaagcaggaaaagtgggaagttggggtcacgcttggatgagtggtggaggaagttatttgttatggatgacatctcatatgcctgaaatgcacacacaataagttctcagtaattattagcctttatcattatgctttttgaacttttctagggactacatattttcggagaaataaaattgagaataatttctctgcaaatgagtgagttgacctttcccaaatgagtatcatttaaggccattggaacaattagtattgttaaatttaacttcatatgggcagaatacaaaacaaaatactagtagaaattatctcctttccaaattagcctagtctggttctcaaagccagacactcagtgtacttacttctaaagccttcagttgtctagtttagtgtgcttatcaccagtgtggaaaattttatatttacattgctgaatcacctctcagtacatttgaatggcctctcttttgctttttgtctagggctgaagtgtcattcaaaaataggggtgactcaggaagagtttacaggagggagaaggctgaaatgataacaaatctaatttttaaaccatgccagttgtgttagtctgtttttgttgttataaaggaatacctgagactgggcaatttataaagaaaagaggattaattggctcatcgttctccaggctgcacaggaagcatggtgctgacatctgcttctggtgagggcatcaggaagcttatggtagaaggctaagggggaacagccacctcacatagtgaaagtgggagcaagagagagaagagggaggttccaggctctttttaacaaccagatctcatgtgaactgagtgagaattcactcatcaccaaggggatggcactaaaccattcatgagggatctttcccccatgattcaatacctcccaccaggccctacctccaactttggggattacaattcaagatgagatttggaaaggaccaacataaaaaccctatcaccagtgctttcatatttagttacatgaatcaaaaaagtgttttgattttgaacattaagaaatattctttcatatccttttcagacaacttgtatgtcttttggatgtctttttcagatgacctatttctcctttcacaacccatagtatcacgacttgtacacagtaaatatttaataagtctgtgctgactgatctttaatgacaacataagcagttctctgaaatgccctttgctctacctcttggcctggtaaatttattttatgattcggtttcaatgtcacatttaaaacggttcccagctctcatcgttaaaatgaatgggcccctgttccaggtagctcatacccagtttccattacattgtcgttgttcatctgtttctcattcttgccttttatctaccaaggagcagggagatttgggcttattcatctttagtatctctgataccttgcatgtgcttgccatctgtaaagtgctccagaattttctggcaaatgattgtgtgacagggagaaaactcattctataagcatgatgtaggctttagttggcaaaccctgccctctaaaggtttttgcttctttaaattttttctgcagttagaatactgctgtcaaatgagcaatgagtaactgattatgactttgtgatccaattagcagatgtgattaggggatggttagcctttgtttctatacctacttcttttaaattcagaataatccataattgatactcagtatatctttgctgaaagcacagatttcaccaagatgttaacaatggccatatttgagtagtagtatttttatttaactgttttctttagacataatgtttttcgttgtttgaattttctttttcaggatatgtattagaaaaaaaaactattttcattttttaaaatagatggtgtatgaggtagacaattgagagaaatgaatgctttgatgcaacttggaaccagtcagggctggatcacaatgaggcagtctacagtttggtaacaaatctcagtggtttaggaaagcaaaagtttatttgctccagattgatggggactcttctacattcagtctctcagatccaagcctccttcagctcaaagtgacttccaaagttgctgtggccaaaagagggagaaatcgaagagaccagccagctctcacctggctcagcgcatgtcactttccttggccaaaacaagtcccaaggccccaagcttactgcacaagagagtggaaaatgcagagaagcacatggaatccagtatatggtgagcaccagttgtctctgccaacatgacggtaactcttttcatttttcagttactgtaatgaatgtatgttggatccagactgcggtttctgctacaagatgaacaaatcaactgtcattgactcctcctgtgttccagttaataaagcatcta

SEQ ID NO: 14051 - DNA, 436 bp, Homo sapiens
gtgcattggttaattcaataaatatatattggtgatccaccctgcagggggctgcatgctgttctacagatacagagttgtctctcagatccaagcctccttcagctcaaagtgacttccaaagttgctgtggccaaaagagggagaaatcgaagagaccagccagctctcacctggctcagcgcatgtcactttccttggccaaaacaagtcccaaggccccaagcttactgcacaagagagtggaaaatgcagagaagcacatggaatccagtatatggtgagcaccagttgtctctgccaacatgacggtaactcttttcatttttcagttactgtaatgaatgtatgttggatccagactgcggtttctgctacaagatgaacaaatcaactgtcattgactcctcctgtgttccagttaataaagcatcta

SEQ ID NO: 14052 - DNA, 61680 bp, Homo sapiens; identical to SEQ ID NO: 1259

SEQ ID NO: 14053 - DNA, 5300 bp, Homo sapiens
agtcccgtggcgtcggcgggagcggcgcagcgcgggccgggccgggacggggactgtcggctgcaggcggccatgcccaccaacttcaccgtggtgcccgtggaggctcacgccgacggcggcggggacgagactgccgagcggacggaggctccgggcacccccgagggccccgagcccgagcgccccagcccgggagatggaaatccaagagaaaacagcccattcctcaacaatgtcgaggtggaacaagagagcttctttgaagggaagaacatggcacttttcgaggaggagatggacagtaaccccatggtgtcctcgctgctcaacaagctggccaactacaccaacctgagccagggcgtggtggagcacgaggaggacgaggagagccggcggcgggaggccaaggctccgcgcatgggcaccttcatcggcgtctacctgccgtgcctgcagaacatcctgggcgtcatcctcttcctgcgcctgacgtggatcgtgggggtggctggtgtcctggagtccttcctcatcgtggccatgtgctgcacatgtacaatgctgaccgccatttccatgagtgcgatcgctaccaacggtgtggtcccagctggcgggtcctactacatgatatcgcgctcgctgggacccgagtttggaggcgctgtcggcctctgcttctacctgggcacgacgtttgcaggggccatgtatattttggggaccatcgagatttttctgacgtacatctccccgggtgcggccatcttccaggcggaggctgcaggtggcgaggcggccgccatgctgcacaacatgcgtgtgtacggcacgtgcacgctcgtgctcatggccctggtggtcttcgtgggcgtcaagtatgtcaacaagctggcgctggtcttcctggcctgcgtcgtgctgtccatcctggccatctatgccggcgtcatcaagtctgccttcgaccccccggacatcccggtctgcctcctggggaaccgcacgctgtcacggcgcagcttcgatgcctgcgtcaaggcctacggcatccacaacaactcagccacctccgcgctctggggcctcttctgcaacggctcccagcccagcgccgcctgtgacgagtacttcatccagaacaacgtcaccgaaatccagggcatcccgggcgcggccagtggtgtcttcctggagaacctgtggagtacgtacgcgcacgcgggggcgtttgtggagaagaaaggtgtgccctcggtgcccgtggcagaggagagccgtgccagcgcactgccctacgtgctcaccgacatcgcggcctccttcaccctgctggttggcatctacttcccttccgtgaccggtatcatggcgggttcaaaccggtccggggacctcaaggatgcacagaagtccatccccacggggaccatcctggccatagtgacgacgtctttcatctatctctcctgcattgtgctgtttggggcctgcattgaaggcgtggtcttacgagataagttcggggaggccctgcaggggaacctggtcatcggcatgctggcctggccctccccctgggtcatcgtcatcggctccttcttctccacctgcggtgccggcctgcagagcctcacgggggcaccgcgcctactgcaggccattgcccgtgacggcatcgtccccttcctgcaggtgtttggccacgggaaggccaacggggagcccacgtgggcgctgctgctgacagtcctcatctgcgagactggcatcctcatcgcctctctggacagcgtggccccgatcctctccatgttcttcctcatgtgctacctgttcgtgaacctggcctgcgccgtgcagaccctgctacgtacccccaactggcgtccacgcttcaagttctaccactggaccctgtcctttctgggtatgagcctgtgcctggcgctgatgttcatctgctcctggtactacgcgctgtccgccatgctcatcgctggctgcatctacaagtacatcgagtaccgcggggccgagaaggagtggggcgatggcatccgtggcctatccctgaacgccgcccgctacgccctgctgcgcgtggagcacggtcccccccacaccaagaactggaggccccaggtgctggtgatgctgaacctggacgcggagcaggccgtgaagcacccccgcctgctgtccttcacgtcgcagctgaaggccggcaagggcctgaccatcgtgggctcggtgctggaggggacgtacctggacaagcacatggaggctcagcgggccgaggagaacatacggtccctaatgagcacagagaagaccaagggcttctgccagctggtggtctcgtccagcctgcgggatggcatgtcccacctgatccagtcggccggcctgggcggcctgaagcacaacacggtgctcatggcctggcccgcatcctggaagcaggaggacaaccccttctcctggaagaactttgtggacaccgtccgcgacaccaccgccgcgcaccaggctctgctggtggccaagaacgtcgactcgtttccgcaaaaccaggagcgcttcggcgggggccacatcgacgtgtggtggatcgtgcacgacggcggcatgctcatgctgctgcccttcctgctgcgccagcacaaggtgtggaggaagtgccggatgcgtatcttcaccgtggcccaggtggacgacaacagcatccagatgaagaaggacctgcagatgttcttgtaccacttgcgcatcagcgccgaggtggaggtggtggagatggttgaaaacgacatatctgctttcacctacgagaggacactaatgatggagcagaggtcgcagatgctgaagcagatgcagctgtccaagaacgagcaggagcgagaggcccagctgatccacgacaggaacaccgcgtcccacaccgcggcggcagccaggacccaagcgccgcctacgccagacaaggtgcagatgacctggaccagggagaagctgatcgctgagaagtacaggagcagagacaccagcctatctggtttcaaagacctcttcagcatgaagccggaccagtccaacgtcaggcggatgcacacggctgtgaagctcaatggcgtcgtcctcaacaagtcccaggatgcgcagctggtcctgctcaacatgccaggtcctcccaaaaaccggcagggagacgagaactacatggagtttcttgaagtcctgaccgaggggctgaacagagtcctcctggtcaggggtggcggccgggaggtgatcaccatctactcctaatgcccaacagcatcacggcactctgggacaggcacggaggacggcgtgggcagcctgggcctgggcttggcccagggaaacagacggcagacacacctgtcccccagtgatgccgcccaagctgcccatggggcttcctacggaagtttctaggcccgtcacctagggctctcctgttcagccttaacaggctcagcaaatcagggcgtggctggacgatttccttgcatctgagggcagacgctgctaccggagtgacctggacgtggccagatcttctcgcaggtcacaagaagccagtgagcccttgccttggtttctggaagttcttttccttggctggatttacccagtggttaggttgcatttctaccccatccagaacattcttggaagagcacccggagctgaagctgtccctgatgatgaaggtgaaacgtcagccctggccatggctccgctcagggccccggtcacctccgagtcactctgttccttgactgtctttgtgtttctgtacctcaaggcactgaagctggaggactctgtccatgcccgtgtcaccctcgtgtgggagcctctgggctcggcaggtccacatttcatgagctgaggcgtgggccagggccatctggaaagggaactcggcttttccagaacgtggtggatcatctgtcgggtgtgtggtgaacacgttcagttcatcagggcctacgctccgggaaggggcccccagctgtggctctgccatgccgggctgtgtttgcagctgtccgagtctccatccacctttagaaaaccagccacttcttttcataagcactgacagggcccagcccacagccacaggtgcgatcagtgcctcacgcaggcaaatgcactgaaacccaggggcacacgcgcgcagagtgaacagtgagttcccccgacagcccacgacagccaggactgccctccccaccccaccccaccccaggagcacggcacacagttcagcctctgagctggctcacacgtgccatccccaccccggtgctccagggaaggaggacacggacccgacgtgggaggtcctcaggcagcagtggcgcctggtgtcaggtctgtctggctgagtcccgggcgtcccctgccatggcctgtgccttgcatggaggcggcggtggcactgaagagatagctttcaagggcccaacactttgcacttcggctggctgtgagtttctgctttgtaggttgtggtcacatttgcaggctgcgggcagtggcaccgacttgggcctccctttctatgtggcatatttatttatttaaacaccccagggagttacgtggtaacaaggttgtccataaagaggttgcttctatatactagaggccccagatggccaggccttgggctacgtctggcttgcatggtctcccaagggaatcagccccatcaacaaagttcaaatcggggcagaggctgcacttgtgcccccagatgtttctgaggagccagactagggctggcattgctgtagagtgacggctgctgcccagagcgtgtcccagacatcacagcggggctcagcagttcccacagcctctgcctgccttggctaagcatgagttaagcagcaaaacgctcctccatgtctggatggggccggcaggtcctgtgtcccctgcacctggaggagagcaggctagaggcacagcggccacatggtgctggctctgaacgttggttggtggctggaaaacagccctgcttctgagggccgctcagttctgcacacgaaaccacctcctgagggctcagctctgcccccgccctgggctgcagcctctgcacgcaagcaccaggcatcctttgtgttgtcaactccgtgtaaccagtaactacagccatttacaattgactccgtttccttttgtaggtttccctgtctgtctgtgttagtagaaaaataaaatcctatgaaatctga

SEQ ID NO: 14054 - DNA, 3001 bp, Homo sapiens
cccacgtgggcgctgctgctgacagtcctcatctgcgagactggcatcctcatcgcctctctggacagcgtggccccgatcctctccatgtgagcccccacaggacggggacctggggatgggtgtatgggcctggagcgtggggcagtgtggatgggaggtcctgctcaggacaagcagtagacaggcatggccagctgtgggcagtcaggatcctgccgggaagggagttgcgccggggaagacaagtacacaggcctccaggcagccgcccgctggggtcagccagggacagtgtggctggacagacggctgctggggaagggacgatggcccatctcttgatggaccaggtggtcacaggatggctggaacctgagggggcctgattcggaatcagtctgagtcagctcacgtgcagagacagacatggggagacaaggcgcaggtgggagggacagtgacaagggtggtctcccaggtggcagtgactgggggctcaggggggcccagtgggcccgtatcagtggccggccgtccctgcaggttcttcctcatgtgctacctgttcgtgaacctggcctgcgccgtgcagaccctgctacgtacccccaactggcgtccacgcttcaagttctaccactggtgaggccactcagcacgggcgtgaggagccccacaggctgggacactgggtgcctctgccactggtgaggccgctcagcacaggcgtcaggagccccacaggctgggacactgggtgcctctacaaggccagctgctctgggcctgaagaccccagcgcgtccttgactgttcctttgcggagtaagcccctgcgcagctgatgagactgcacctgaggaaggcctctggttacgaggatgcccaggtgtctgcatgtgccttgtacctcccgtggtcagcccagccttcccaggcttggggcgtagcccatcagggctgtgggtcttcttaactcccctccccaggaatcaggcgctgggtggacgcttcagccccttgttgcatgcacagccgaggtgctgtgtgcacgctgggagctggagctatgtactgggttttggagtgacagctcccacaggggcccagggagccacgtcacccctcagaggtggttgagtacagccatggtcgtcaggcgtcagtgactgttttcctagtgttaacagagagttttactgagggaggggcagtgtccgtgtggtggtggctgaggtgtgggggctgcatggcgttgggccgccccgagccacttgccccgcccccaggaccctgtcctttctgggtatgagcctgtgcctggcgctgatgttcatctgctcctggtactacgcgctgtccgccatgctcatcgctggctgcatctacaagtacatcgagtaccgcgggtaagcgctgtcagccccccttacagacccggcgcacgggagggcgggcccctctcatgctatgcctggggcagctccctggaggggcctccctggggcttgagcgtcgtgtgccctcacaggggcagctgggagcacgtccaggtgggctgtgttgtgaaagctggggtttccctcccacttccagccaggccgaggtgcctgcacttgtggacagggtctccagcctggagctctgtctcgtgccgtcctcagcaggcggtgagcccacggctgactattcctgctacgtgtctcgcgaggtgtccccaggttgtgtctgtactcactcggcagccacaggcgtccttccccgtgccccagcacccaccctccctccacctgcacccgcctcgtgcccggggtccagccacttccctgtcatgggcctcctgtcccccgtcctgtgaggaaggcacctcacgcatgctggacgtagacctcgttccctccacagccacagcaccctctgacccggtggctcctaggacgggctcccttcagggcaagggtgggcatggaggcctccctcctcatccagggacttttcctgggggtcctgtttgccccaactcacctgcccccagaagtcccctttcccaggtgggagaggagcctccaggtacgcggctggacaaaccccgacttcctttcccacagggccgagaaggagtggggcgatggcatccgtggcctatccctgaacgccgcccgctacgccctgctgcgcgtggagcacggtcccccccacaccaagaactggaggtgagcaccgcccatgccccgtggtcctcagacgcacagaagagctgtttctgaggtcggcctttgagtggggacctttgagtctcaggggcctctcaccttcagccgctcaggcaaggtctggggtgtgaacactgcctggtgcagagcggatggcgcagctgggggccgggggtgtccctgctgcagggtgggggtgtggggagccggcccctctgccagcacagccctgggcttggggtgggagagggtggctcctgctgaagcaaaggccatctttgggaagcctctgcccctcagggcctcggcgggggcctcaggtgtgtgccccgggccattgtcccctcaggggcctcggcgggggcctcgggtgtgccccgggccattgtcccctcagggcctcggtgggggcttcaggtgtgtgtcctgggccattgtctcacctgtctagcatgtcacctgtcccacctgtctaacctacctgttctcctgtcctgcctggctagtgcccacctgtccatcggccctgcctgtcccacctggcttctgtggcctgtctcacctgtcacctgttcaacttaccccacgtgtgtcacgtttccccatcccatctgtcacctgccccttttgtcccctgtcccgcctgtcatgtatctcccgtcccacctgtgtcgtgtgccccgcccgtcccatctgccctgcctgttgatgggccgtgccctggtaagcgttgccgtggtaacagccgccccaccctggctgcaggccccaggtgctggtgatgc

SEQ ID NO: 14055 - DNA, 680 bp, Homo sapiens
cccacgtgggcgctgctgctgacagtcctcatctgcgagactggcatcctcatcgcctctctggacagcgtggccccgatcctctccatgttcttcctcatgtgctacctgttcgtgaacctggcctgcgccgtgcagaccctgctacgtacccccaactggcgtccacgcttcaagttctaccactggtgaggccactcagcacgggcgtgaggagccccacaggctgggacactgggtgcctctgccactggtgaggccgctcagcacaggcgtcaggagccccacaggctgggacactgggtgcctctacaaggccagctgctctgggcctgaagaccccagcgcgtccttgactgttcctttgcggagtaagcccctgcgcagctgatgagactgcacctgaggaaggcctctggttacgaggatgcccaggaccctgtcctttctgggtatgagcctgtgcctggcgctgatgttcatctgctcctggtactacgcgctgtccgccatgctcatcgctggctgcatctacaagtacatcgagtaccgcggggccgagaaggagtggggcgatggcatccgtggcctatccctgaacgccgcccgctacgccctgctgcgcgtggagcacggtcccccccacaccaagaactggaggccccaggtgctggtgatgc

SEQ ID NO: 14056 - DNA, 3140 bp, Homo sapiens
gccagcgcactgccctacgtgctcaccgacatcgcggcctccttcaccctgctggttggcatctacttcccttccgtgaccggtgagcccgctgctccaggcttccccttctctttctttctctccctctcttttttgaggcaaggtcttgctctgtcacccaggctggagggcagtggtgtgatcacggctcactgcagcctcaactcctagacacaaatattcctcccacctgagtctcccaagcagctgggaccccaggcacccagtaccacgcccggctaatatctgtattttttgtagaggggggcagccgggaccccaggcacacggtaccacgcccggttaatgtctgtattttttgtagacgggggtctccccacgttgctcaggctggtctcaaactcctgagctcaagccatcctcagcctcccaaagtgctgggattacagacgtcttgagccaccacgcctggcttccttctttctcttcctttgtctttgtccatttctctgtctctgtcattctctcctccggcactctttctctctccccctacccttttccctctctctctgtctgtctctctctctctctctgtctccctcttcttccctccctccctctctctctctctgtctgtctgtctgtctctctctctgtctctctctctgtagtgtgttccttcctgcccctgcttatcttgcctgtttggctcaggggaagtggctgaggtctctgccctgcgtcctgatggatttgtgagaagcctgtctgctgctctcccaggcagccctgtgtcaggagaagctgttgtagggttgctgggaacacctggcaggctgttaggagacacctaggagtggcctcagtgtgagctcagaggccggggacctcggccctctgtgtcctcctcaaacagtgggccttgttccggcggtgggtggggcccttggttgttccccagggggtggggccaggccccgtgctcttcgagtcgcacacacacgcccccggctgtctccactcggccttcttgtcgggacgcccctgacaggcgctggctgcttgtgcagcctgcagctgcccttctggtcccttctggtccctcccacgtctgctcccggacttcatctcagcacatccgaaagccctggagcccagggtcagctgcagggcctggccacagcgctggcttctcgtgtttcccttgcctccactgaaggtgggcccgtcttgctatggagggggtgatctgccgggggtcctctccctgtacctccgctccagcctcccccgtccgtctgagtgcgctccgcgccgtgggtggagggcgtgggggcagagcctctgcgtggctcctggtgtctccgcgccgtgggtggagggcgtgggggcagagcctctgcgtggctcctggtgtctccgcgccgcgggtggagggcgtgggggtagagcctctgcgtggctccgggtgtctctgagccgcgggtggagggcgtgggggcagagcctctgcgtggctccgggtgtctccgcggcactggattgtgggctctgctgcctcccaggccaccccgagcaatgggtgcttcaggctgcgccttggatgggaccgagccaggcgtgaagtggcccccaccgacccggcttcccagagctttgtaggagccgattgtgtggaaacatccccggccgtggctccctagagcaaggtggtgccacagcgggaggggtcgcagcgtctgctggcctggctggctgggctgagtcgttctaggatctcattcccaaagtccttaggtcctgggggcctgtgagccattgctcagcaccgtctctgggctgacccttggccatgggattaacacaggctccagagaagccctgggtgtggggggcgtgggggtcagtgacggggtcggttctcgtcctcggatccaggggagcagtagacgtgggtgctcatccgcgtgcctgggcccgcatcccctcagccgcagtattgcagcgtgggctggcggagcttggactgcagcctcggctgcagctcacgctcggggtctccccagagaccgcctttccagctttctgggcaggggctgccatcacatggcactgactcctcagatgggtctttgcagcattttccatgttcacaggtatcatggcgggttcaaaccggtccggggacctcaaggatgcacagaagtccatccccacggggaccatcctggccatagtgacgacgtctttcatctgtatccttggaggggtgcaggcgagggttccagcctctgcctggggggaggcccccatgccctccccggctcagcatcataccctcggccaccagcatgtgacttcccaggttaggctgtgctctcaccacgtcatcctccctgggagacggggcaagggctgctgtcaggaccctggcttcttcaccactgtgtgatgcgatcgtagagaaaacagaagcagtcaccctgccgcgtgtggacagtgatgcgcagcggtgtgtggggtgtgccgccggcaggctgggcccgcggggcctctggcttctcaatcccaaggctgcctctttccagccgagcattgtcccctcagcatggtcccctgccaatccctggcggtcaagcaccaggccaggtgtgtgtccaccaccccagggccccgttctgtggcgctggacagagccccaggagggtgcgctgaggacacgggggacaggacgtgcccgggatgggatgggatgcagaacggtccccgcccacctggatcctgcggcccgctggccagtgcatctccccacccaccccaccccaccccaccccaccccccgtacctgaggaccctgcacccacggacctgcctttccttgacgagggctgtggatctctcctgcattgtgctgtttggggcctgcattgaaggcgtggtcttacgagataagtacgtttccacctgcagttttcgtgcaaagcctgtagtcttcaagggttttcctgaggatgaattcggctttgaaattacatcgccctaggacttcatgtccgcgtgcagagctgaaggcgtcctggtcccagggttgggatcccttggtctgatgtgtcgtctcttccgctggagcctag

SEQ ID NO: 14057 - DNA, 421 bp, Homo sapiens
gccagcgcactgccctacgtgctcaccgacatcgcggcctccttcaccctgctggttggcatctacttcccttccgtgaccggtatcatggcgggttcaaaccggtccggggacctcaaggatgcacagaagtccatccccacggggaccatcctggccatagtgacgacgtctttcatctatctctcctgcattgtgctgtttggggcctgcattgaaggcgtggtcttacgagataagtacgtttccacctgcagttttcgtgcaaagcctgtagtcttcaagggttttcctgaggatgaattcggctttgaaattacatcgccctaggacttcatgtccgcgtgcagagctgaaggcgtcctggtcccagggttgggatcccttggtctgatgtgtcgtctcttccgctggagcctag

SEQ ID NO: 14058 - DNA, 17907 bp, Homo sapiens
ggtactacgcgctgtccgccatgctcatcgctggctgcatctacaagtacatcgagtaccgcgggtaagcgctgtcagccccccttacagacccggcgcacgggagggcgggcccctctcatgctatgcctggggcagctccctggaggggcctccctggggcttgagcgtcgtgtgccctcacaggggcagctgggagcacgtccaggtgggctgtgttgtgaaagctggggtttccctcccacttccagccaggccgaggtgcctgcacttgtggacagggtctccagcctggagctctgtctcgtgccgtcctcagcaggcggtgagcccacggctgactattcctgctacgtgtctcgcgaggtgtccccaggttgtgtctgtactcactcggcagccacaggcgtccttccccgtgccccagcacccaccctccctccacctgcacccgcctcgtgcccggggtccagccacttccctgtcatgggcctcctgtcccccgtcctgtgaggaaggcacctcacgcatgctggacgtagacctcgttccctccacagccacagcaccctctgacccggtggctcctaggacgggctcccttcagggcaagggtgggcatggaggcctccctcctcatccagggacttttcctgggggtcctgtttgccccaactcacctgcccccagaagtcccctttcccaggtgggagaggagcctccaggtacgcggctggacaaaccccgacttcctttcccacagggccgagaaggagtggggcgatggcatccgtggcctatccctgaacgccgcccgctacgccctgctgcgcgtggagcacggtcccccccacaccaagaactggaggtgagcaccgcccatgccccgtggtcctcagacgcacagaagagctgtttctgaggtcggcctttgagtggggacctttgagtctcaggggcctctcaccttcagccgctcaggcaaggtctggggtgtgaacactgcctggtgcagagcggatggcgcagctgggggccgggggtgtccctgctgcagggtgggggtgtggggagccggcccctctgccagcacagccctgggcttggggtgggagagggtggctcctgctgaagcaaaggccatctttgggaagcctctgcccctcagggcctcggcgggggcctcaggtgtgtgccccgggccattgtcccctcaggggcctcggcgggggcctcgggtgtgccccgggccattgtcccctcagggcctcggtgggggcttcaggtgtgtgtcctgggccattgtctcacctgtctagcatgtcacctgtcccacctgtctaacctacctgttctcctgtcctgcctggctagtgcccacctgtccatcggccctgcctgtcccacctggcttctgtggcctgtctcacctgtcacctgttcaacttaccccacgtgtgtcacgtttccccatcccatctgtcacctgccccttttgtcccctgtcccgcctgtcatgtatctcccgtcccacctgtgtcgtgtgccccgcccgtcccatctgccctgcctgttgatgggccgtgccctggtaagcgttgccgtggtaacagccgccccaccctggctgcaggccccaggtgctggtgatgctgaacctggacgcggagcaggccgtgaagcacccccgcctgctgtccttcacgtcgcagctgaaggccggcaagggcctgaccatcgtgggctcggtgctggaggggacgtacctggacaagcacatggaggctcagcgggccgaggaggtgggccgggcggggtctgggggccaggcctctttcccaccccagctgcacaggaaacgtgccctggcatgtcctcatcgcagcgtgtcaacacggtgctgtgcgtggcgctgctgtgttttagccgtggcggtggctttgagctcagagcagcgcgctaaggcctgggagcaccagccgcaccccgggaagcttgggaggtgtgagggccattagctttccaagggcgaaccctgggaccgcctcctcccgccatgggtgagccccgtccagagccgtaatcatggttctgctgcaagctcagtctcccgctgttcaggctcactgggggctgcataagtgtgatgcccgtgtgctgggggctcactgggggctgcataagtgtgatgcccgtgtgctgggggctcactgggggctgcataagtgtgatgcccgtgtgctgggggctcactgggggctcactgggggctgcataagtgtgatgcccgtgtgctgggggctcactgggggctgcataagtgtgatgcccgtgtgctgggggctcactgggggctcactgggggctgcataagtgtgatgcccgtgtgctgggggctcactgggggctgcataagtgtgatgcccgtgtgctgggggctcactgggggctgcataagtgtgatgcccgtgtgctgggggctcactgggggctcactgggggctgcataagtgtgatgcccgtgtgctgggggctcactgggggctgcataagtgtgatgcccgtgtgctgggggctcactgggggctcactgggggctgcataagtgtgataccgtgtgctgggggctcactgggggctgcataagtgtgatgcccgtgtgctgggggctcactgggggctcactgggggctgcataagtgtgataccgtgtgctgggggctcactgggggctgcataagtgtgatgccagtgtgctgggggctcactgggggctcactgggggctgcataagtgtgatgcccgtgtgctgggggctcactgggggctcactgggggctgcataagtgtgatgccgtgtgctgggggctcactggggctgcataagtgtgatgcccgtgtgctgggggctcactgggggctcactgggggctgcataagtgtgatgcccgtgtgctgggggctcactgggggctcactgggggctgcataagtgtgatgcccgtgtgctgggggctcactgggggctgcataagtgtgatgccgtgtgctgggggctcactgggggctgcataagtgtgatgccagtgtgctgggggctcactgggggctcactgggggctgcataagtgtgatgcccgtgtgctgggggctcactggggctgcataagtgtgatgcccgtgtgctgggggctcactgggggctcactgggggctgcataagtgtgatgcccgtgtgctgggggctcactgggggctgcataagtgtgatgccgtgtgctgggggctcactgggggctcactgggggctgcataagtgtgatgcccgtgtgctgggggctcactgggggctgcataagtgtgatgcccgtgtgctgggggctcactgggggctcactgggggctgcataagtgtgataccgtgtgctgggggctcactggggctgcataagtgtgatgcccgtgtgctgggggctcactgggggctgcataagtgtgatgcccgtgtgctgggggctcactgggggctgcataagtgtgatgcccgtgtgctgggggctcactgggggctgcataagtgtgatgcccgtgtgctgggggctcactgggggctgcataagtgtgatgccgtgtgctgggggctcactggggctgcataagtgtgatgccgtgtgctgggggctcactgggggctgcataagtgtgatgcccgtgtgctgggggctcactggggctgcataagtgtgatgcccgtgtgctgggggctcactgggggctgcataagtgtgatgcccgtgtgctgggggctcactgggggctgcataagtgtgatgcccgtgtgctgggggctcactgggggctgcataagtgtgatgccgtgtgctgggggctcactggggctgcataagtgtgatgccgtgtgctgggggctcactgggggctgcataagtgtgatgcccgtgtgctgggggctcactggggctgcataagtgtgatgcccgtgtgctgggggctcactgggggctgcataagtgtgatgccgtgtgctgggggctcactgggggctgcataagtgtgatgccgtgtgctgggggctcactgggggctgcataagtgtgataccgtgtgctgggggctcactgggggctcactgggggctgcataagtgtgataccgtgtgctgggggctcactgggggctgcataagtgtgatgccgtgtgctgggggctcactggggctgcataagtgtgatgcccgtgtgctgggggctcactgggggctgcataagtgtgatgccgtgtgctgggggctcactggggctgcataagtgtgatgccgtgtgctgggggctcactggggctgcataagtgtgatgcccgtgtgctgggggctcactggggctgcataagtgtgatgcccgtgtgctgggggctcactgggggctgcataagtgtgatacccgtgtgctgggggctcactgggggctgcataagtgtgatacccgtgtgctgggggctcactgggggctgcataagtgtgatgcccgtgtgctgggggctcactgggggctgcataagtgtgataccgtgtgctgggggctcactgggggctgcataagtgtgatgccgtgtgctgggggctcactgggggctcactgggggctgcataagtgtgatgcccgtgtgctgggggctcactgggggctgcataagtgtgatgccgtgtgctgggggctcactggggctgcataagtgtgatgccgtgtgctgggggctcactggggctgcataagtgtgatgcccgtgtgctgggggctcactgggggctgcataagtgtgatgcccgtgtgctgggggctcactgggggctgcataagtgtgatgccgtgtgctgggggctcactgggggctcactgggggctgcataagtgtgatgcccgtgtgctgggggctcactggggctgcataagtgtgatgcccgtgtgctgggggctcactggggctgcataagtgtgatgcccgtgtgctgggggctcactggggctgcataagtgtgatgccgtgtgctgggggctcactgggggctgcataagtgtgatgcccgtgtgctgggggctcactggggctgcataagtgtgatgccgtgtgctgggggctcactgggggctgcataagtgtgatgcccgtgtgctgggggctcactgggggctgcataagtgtgatgcccgtgtgctgggggctcactgggggctcactgggggctgcataagtgtgatgcccgtgtgctgggggctcactgggggctgcataagtgtgatgcccgtgtgctgggggctcactgggggctgcataagtgtgatgcccgtgtgctgggggctcactgggggctcactgggggctgcataagtgtgatgcccgtgtgctgggggctcactgggggctgcgttaagtgtgatgccgtgtgctgctgaatttctgcccactcagagctttgtggggagggacgggtgagtgccccgggcgtgtagcatgctggtgccagctctgagccctgctgctgcagtcggctgccccaggacatcggggtctgagactttgtgtcttcatttctctgattttcaaacttcttatgggaagcttcacactatccagaaacggaatgatgacacgatgaaagcctgtggggtcccatcacgtcacgtcacgtcacgtcacctggagttacttctgtatttcttgctaaagcagggagcttttgagtgcccacctgcgtgattttcatgccaagggcacctcattcccaggcagggctggctgccgtgggcgcctcgagcctcctccttccccctcatgtgtgtgggagtctgtggggcctataccacgtgcctgttgcagtggtgtgtgtccgaggtccctcccatgcgggtgccccctctgtccttgctgtgggttgggagccagctccctgctgccaggcccccactgggaccttgtgggtgtgtccaggcatctgcagccgccccccaccgcctccccggtccgtttctctgcacaaccacagccgcactgaggcccgtccaggtctgggccggtcagcctaggggtgggaaccctgctcaagagggctgtgggcacgtggatggtagcagcctcaggtggtgtggcctagggccaggatcccatggaggtaaaaaatggcccccgccgctcccgccacgttggccacgtggatggccaccttctcaggctgttgcacaggttcgccttcccagggaagacaggagatgctctgggccttccctttccctgacggcggcgtcatggctcaccacgggttcaggcgttagctgctattgactgtgaacccgtggatttaggtatcgtggttttcggggggatgttcacggtcctggtccccatatgtccctttccgtgttccttatcccatgctggaatgctcttaggaggaatcccggagttggaactgccctgctggcgtggattctaagaatcctggcactgcctggcctccctggaggtgtgtgagggcgcgtctgtgcgcacgagggacagggcagggattgcagtgactgggggatgacgggaccccctgccacgctctgccacagtcttcacggccatgggaagagctgcgctcacttatactctcacgttaacggagctcacaggcagatcctctccgtccgacagcccttcggctggggggtctggggcagcctcagacaggagcccgctcttgcggacgggaggacgagcgcaccctgcccccgctgctctcagcgagcctttggctgtgacttagctgcattggttgcgagggctggagccagccgcaggccccgccttcccttggctgcctttggggctgcactgccctggggagccgtattctcctccatcgtggctatgttagtgtgaaattagagaaatctgggcaaatcttttttatttatttgttttttaatttttatttattttttgagacagagtctccctctgttgcccaggctgcagtgcagtggcgccgtctcagctcactgcaacctccacctcccgagttgaagcagttctcctgcctcagcctcccagtagctgggattacaggtgcccaccaccacgcccggctcatttttgtatttttagtagagacggggtttcgccacattggccagtctggtctcgaactcctgagctcaagtgattcgtctgcttcggcctcccaaagtgctgggattacaggtgtgagccacggcagcctgtctgggcaaggctgtaaagcatggacatttctctaagaagcgtgcagcttcgtgactcatgcagtcgccagggaggctcatgcgcgcccttgtgctctgttctgtgtggcactgattggcataaaaggggtcctaaggccctggtgttcttgctccccgctcgtaaagttgtcctccgggttgaggtctgtctgcacggaggcctctgcgactgctgcgccgggcaggtgcggggacttgtgataacagggtccccgacacggtgctgacttgtgataacagggtccccgacacggtgctgacttgtgataacagggtccccgacacggtgctgacttgtgataacagggtctccccacacagtgttgagttcctgccaggccagggcagtgccgcgtcctcctgaaaccctgcagtcctgcaaggtggttttcccaacagtgaggccagaagagagttgagatccccagctccgactcctcggagccagcacgtgggggtgagcacagcagccagtcatgtaggaagtggccccgtgacgtggctccagcacttggaggccctcagggcccctccagtggctgcatccaaacttggctgatcctgaacagccgtttccctgggctccgttctccggccagatcggggcacaagaacagagaacctgaattgccctgcagaggggtctcgtggggatgagaagcagccgcataaaggggctgctgtgtggcctttgctgaaatagccacacttcctgccttcttcccacatgacgcccgatgcgggtgcttccctgtgccttcctgcccagagacggctgtgtccaccccgcagcgtccgcctccagccggtctctgcctctctggggcccctgcctccgcttgctggctggtgccccttgggggtaacgtgttcaggcctttcctgacctaaacaaaagtctcaaagaggagcatatctgctggccctgcaccctgtcccgtcttgcgcccgggcagctgggcagaaggtggaggtgtctggagagcagggtaaggacgaggggtgcctgaggaggagtggggccgtgggagaacattggatgttgttttgtgtgtgaagggctggtggagctctaggtgtgagccagggtagggggtgaggataccagtcaggctgacgtaggggctgctggaatctcggcaaaggaggcaggtggtggctctgatccctgagtggcccggggctgctgtgatgggacacagaccacacggctcacagcaaagggcgtctgttctctcctagttctggagcccaggagtctgagatgaaggagaccgcaggccacgctgcctccagagtctcccgggaggatcctcctgcctcctccagctcctgggcccccgggcgaccctgggcgcctgtgcctccacgcagtctcttcctcccagtctgagagctcttcctgccttcatcctgtaaggtcacttgtcagtggcttcagggcccacctctgacccaggatgctctctcaacatcataacctaattacagggttcttcaatacatccataaagacaggttttccaaataaggttgcattctcaggttcctggggctgggatgcgggtatcctcttttttgggggcactattcaacccactgcaattgagctctcggccctaaaattcatatctgccacacatgtacagtatgttcaccccatctcagtgtctcctgaagtctcaggcctgcacagaccagctctgagtcccaactctcatgtaaatctcattgctcggagctcccaaatctcatcctctaagcatccaaaccagaagccagtgaaatgtggggtctggtccatcctggacaaaactgctgtgtctgtagatgtgcaagtgaggaggtggttatcccagaacgcagcaggggacaagccaggagaggcatgtttgctccaaaagggagaatcaggtgggaaggggccactggtaccacacaaggctgagacccagcagggcaggccctggggttccagggcctgaaggtcagagggtgggaggcctgcgtccacacatgcatggctttagtgcgtggcaggtcctcggccacgcacgtgcaaaccccatggagtcaagccgttccgtggtgcagcctcatcagacacccctgggaagagactgcacacagcagtgaccccctccaaccccgggaggagaccacacggcagtcccccacccccgccccccgccgttgctgttagggtgctgcatcctggaccccacggcctccctttgaagagctgctaatttggcccattttcgggtgtttctgatgcaccaggtggatgaacctggcccagagcgtccgagtgaactgggggtgggtctgggatgttgtggatcgcctcagagaactgcctggcgttgtgtccccagagcagccctccacatcccctgcacgtggcatcagtcacacctgctctgtgtctctctccccagtgtgtgagcacgcacatacacacatacacacacagcggccgggagcaccgcagcacaccgttgagccttcgggccttccctcctgctgggtccacaggggaggtggtgcgggtgccctggccaccgtgggtggtgggcgtgggtctgtgcaccccattcctgctgtagcaccaacctgtcctgtctcccgcagaacatacggtccctaatgagcacagagaagaccaagggcttctgccagctggtggtctcgtccagcctgcgggatggcatgtcccacctgatccagtcggccggcctgggcggcctgaagcacaacacggtgctcatggcctggcccgcatcctggaagcaggaggacaaccccttctcctggaagaactttgtgggtaggcatggctggcggcccttcggcatcccctcaccgtcccctctgtgtcctctcagtgtcccctcgctgtcccctgtgtgtctcctcagtgtcccctcgctgtcctctcactgtccccttttcgtccccactgtccccttggtgtcccctctgcatcccctcgccgtcccctcactgtcccctgtgtgtctcctcagtgtccccttgctgtcccctcactgtccccctctgcctcccctcgctgtcccctcactgtcccgtgtcccctcagtctcctctgcatccctttgccatcccctcgctgtcccctaaccgtcccctcaccatctcttcgccgtcccctcactgtcccctcaccatctcctcgccgtcccctcgcggtcccctcaccatctcctcgccgtcccctcgctgtcccctcgccgtctcctcgccgtcgcttcgccgtcccctcgccgttccctcactgtcccctcgccgtctcctcgctgtcccctcaccgtccccttgctgtcccttcaccgtctcctcgccgtcccctcgctgtcccttcaccgtctcctcgctgtcccctcaccgtcccctcactgtcccttcaccgtctcctcgctatcccttcactgtctcctcgccgtcccctctgtctcctcgctgtcccctcaacgtccccaggcctgtgcgctgtcaggtcccgatgggccttgaggccaccgacccgagggtgtgtgctctgaggctgtcgaaggccctggccctgggagcggccatctgaaagtgtccaggcactccctccccttctcccagagccccgcaggggctgggggattccctggacacatgaccagcagctgaactctgctgtgagtctctggctggtccttggaggagctgacggagtgagggtgggggctttgtggggacccccctcgcctcgccgtgcccgcccctgcactggctgtgagtccccggggaggccccttccgcaccctggcctcagatgacctgcggacggccgcctctctccgcagacaccgtccgcgacaccaccgccgcgcaccaggctctgctggtggccaagaacgtcgactcgtttccgcaaaaccaggagcgcttcggcgggggccacatcgacgtgtggtggatcgtgcacgacggcggcatgctcatgctgctgcccttcctgctgcgccagcacaaggtggggcgtgcgacggggacacgccagccggagcacggccaccccacgtgctgcgggccgggacgggctcctctgaggccccacagccatgccctccctgtctgcaggtgtggaggaagtgccggatgcgtatcttcaccgtggcccaggtggacgacaacagcatccagatgaagaaggacctgcagatgttcttgtaccacttgcgcatcagcgccgaggtggaggtggtggagatggtgagtcccgagggcttgaggggaggaggccggggggaggtggggaggaggtggggggcggcccgggagggctgtgggcctcgtgaggtgggggtggagggggaagtggagatcgggagggctgtggcctcgtgaggtgggggtggagggggaagtggagatcgggagggctgtggcctcgtgaggtgggggtggagggggagatcaggaggtggaggtggaggtggggaggagaaggtggtggcgattgtggcgggggctgccaggccttgcggggtggtcaaggaggcttggttttggaatcgccaggacatcacagaaagcacagagccccgtgtgttgcttgtggacacctcgtgtaacacgggtgtgggtgttgccctagagccggcatcagcatctccgtgtcctccatggtcccgtgtcctcctcggcccgggaccccgtccaggacctcacacctcagtggtgttgccatggtgggtgcacctctgagcacctcccgttttgggtgctctccccagatgggctcaccttcccacggctggaaaccacacatcagcagtcgggacccggggagaggggcactggtcagtgaggccaggctgcagctgtcacgtgggacagacaggccctcggtcagctataggcagggcctggacagagactcgtcccgtccttcacgcctggagaggacggggttgatgggcggaggcctggcattggagcgcttgcccccggcccccaagcatggagctctggatcctggggatctggtgggccccttgtgctggatggaaccatgcctgctcgctaccagcccacccggatccacggctgtgccttcccctccggtcctgctggcggtcccgggactttgtgggttctgaccccacttggatcacgccgacaacactggtcttgaagtcagaacccgcaaagtcctggtttcttccggctcccgtgaccccagcgcatggttttgcaggtcctcaggggcctggactcctggaggtgggtgctgggaagacataaagctggatagagactgtcacgctgtcccccaggaagccacctgtgcccctgcagcagcctgggaggtgcggtctctccagccccgcagccccccagtcccccagtccctcagtcccccagccccccagccccccagccctgggtatggcagaggccccgagcacctgctcctggtttgtgtcgggctgtgagtgaggccaggcacggcttcgtgcctcaccgacaaccttctgtgtttctgtgtcagttcccgtggaactcagttgtcctgtggggttgttcttcctcttgccctgcaggacctttcctaggccgagggctgcaggcctgcgtgacgctggatggttttctgcccagttttgtacactgggcttagtttccatgtggctgtgtcttcggggacgatggctggagtttgtcttgtttggacgaggctttgcgggttcaaggttgtaggggttattattggtgctaatagtcgtatgaataacgttatttccaagtcataaaaccgcttagtaaaatagtaacaaaatgctgcctgggagaaccagccctgccagggggccaggtggggcggccactggggcccagaggaaacaggcaaagtgagcccatggccccagccgcacccccagcccctccgtggtgccagaagcagctccccagctcctgagcaggggttgttagctctgaagtccgggaacctggagctcccagcaccccccatgctcccagccatgtctctggcagggctggggctgcccacccctccgtagccctggccgcagggacaagtgccacctggctggagaggggcgtctgggtcgctgccattcagtctggcatgctgtttatttttttaaaaaaagttttgagacagagtctcgctctgtccccaaggctggaacctccacctcctgggttcaggcaattctcctgcctcagcctcctgagtagctgggactacaggtacacgtcaccatacctggctaatttttttttttttctttgtatttttagtagcaatggggtttcaccatgatggccaggctggtctcgaacttctgacctcaggtgatccacccgcctcggcctcccaaagtgttgggatgacaggtgtgagccaccgcacctgatctggtgtgctgttttaaatactggtgcttaacaggcacagctgctcccaactcccatgagccgggtgcggcgggtgagacacagggatcccgcacggcgggtgcggtgggtgagacgcaggggtcccgcatggcggatgcggcaggtgcggcgggtgcggcgggtgagactcagggatcccgcacggcgggtgcggcgggtgagactcagggatcccgcacggcgggtgcggtgggtgagacgcaggggtcccgcatggcggatgcggcaggtacggcgggtgcggcgggtgagactcagggatcccgcacggcgggtgcggcgggtgagactcagggatcccgcacggcgggtgcggcgggtgagactcagggatcctgcacggcaggtgcggtgggtgagacgcaggggttccgcatggcggatgcggcaggtacggcgggtgcggtgggtgagacgcagggatcccgcacggcgggtgcggtgggtgagacgcaggggtcccgcacggcgggtgcggcgggtgagacgcaggggtcccgcacggcgggtgcggtgggtgagacgcaggggttccgcatggcggatgcggcaggtgcggcgggtgcggcgggtgagactcagggatcccgcacggcgggtgcggcgggtgagactcagggatcctgcacggcaggtgcagtgggtgagacgcagcagtcccacactgtggatgttccgggtgaggcgcaggggtcccgcacggtgggtgcaatgggtgagacccagggtcctgcatggcgggcgctgaggttgtgctgtggcttctccatgtgttctgggtgggtttcccatggtgccaagcccccctgagcatagacaatgacacctgtgagcgtggatcatgcagccccatggggcagtgcctcgccctgagccgtgtgtgccaggttggtttgtggctgtggccttgccctcacagctgcccttgtgcccggtcggagggtcccggggagggacatgagcagagcgtgtgtgcggcgtgactgcccatcgtgcgctcacaccttcctggccactgggcggggggcctgagagccagagggggcctgtggggcccgggacgcgtggcctttcccaccgctcagggcggctcggtctctgggtaccgggctggtgttggagccatccgtggttctgtgcacaccgggcttactacgtgcttgggaactttctaggttgaaaacgacatatctgctttcacctacgagaggacactaatgatggagcagaggtcgcagatgctgaagcagatgcagctgtccaagaacgagcaggagcgagaggtacgtgggggccgtggccacagacaccaggctttctgagaagtatagccgacttcgccgagtcttttctgggaccctcctgcagcccacgagggtcctccagagagcatgcctcaggtactgcgtcgcaggctcagcccccagcctgcgtggaggtggcagaggccctgcaggagcacaggagtggcgtcaaagccagagctcatcggagcctgggcgtgcgggtgcctggttagaggaacggcagcctgccagatgcatgctcatgtgcaggaagggacgagggccgagacctttgaacttagcttttctaaccgagcagcgtgcaggcaggagacatggggaccctccccaagggcagtgccctctgacagggtcagcggcttctgagccggatgagtgcccacagctgcttacgatggctgctttgtctcacagcctgaaaccgtggagcccctcagtgcccttccccgcagcatgcacagatttctgtcctaagaccaagtgggaggggagagtgagtgtgcagggagggagggaagcgagctggaggggagttgccaacccccccaccccccaccccccgacacagacctgtgcagcctccgtgcgtggaagctggccgcctggctgcagcggctttggctccgtgggtaactgtaggctgctgaggacgtctgggtgtatccacctgagttatactggcctgggccccatggccactgtgagaccccaagggcaggtgtctttgtggtcacttcgcactggaggacagcacgggggtcacctggtagcgggatgctcagctctgtgaggtcacggcctcatggggtcttcgtgggtcccaccaggctggtatcacacacgtgtgtctgcagaccaggtgcaggtgttggttttctgagactgcagtgacggcggaggcaggggcaggggatttgcctgccctggggccttggcctcagcaggaacctgcagtacacgggtctgcgtgtggggccatatgtgctgacagccggaatcactaagcagcgactgctgctctcccccaacagagaaaggcgtgtggagctgcggtcctgtccactcccagaccccgggcaggtcagggtgggcacagatgcaggacacggggggccgcccagcttgtccgtggacagagaccccttccacgggggtccgggcagccgggagtgtctgggaggacccacatcctctgttttctgtccaggccaggtccctgagatccggcagggtcgccctggcgtcacaagggttcagcccgggtccagctaggaacaagaatccacccatggcttcatgggaagttcagtgtggagagtcagcaaatgctgaccgaggagggaccgggagcgggaacagcaagctcgagctcgaagggcccctcctgggccaggtgggggttggaggtgtcaccgctctgcagaagggtttggatgagctgctgtgcagacgctgggtggacaccctctagtgacttacacggtggccctcgggccaggtgggcggcgctggctctgccgagagcgggcagcccttgggctctggtttcacgttcaaggccatgggaaatttaggctgggccgggcgccacaatgagtagaggcctggggcccactgtctgtgtccagagagggaggcagccccaggccctcccccatctgtgccaatctcttccctttcgggaaggaccgacatccaagttaaacagttttatccagggaagaagaacctggtccagtgaaatcactctggacctttggctttttaaaatcaccccggggctcacaaactcctgatgcccctgggacgagtggctccccgggctgcgtcacaaactcaggcggggctccagccacagtgggagaggtggccattccagtgtgtgcataaataccacttccaaggtggcacccgtgtctgggagctcccattggcctacctgtcaggctggccacgacagcatggagggcgtgaagggtgcagggaggaatgagaacccagtggagggtgtttaaccaccaggggctgcgccattggtgcgatctcgcggtgagggcgccacttccccttcggcgcctacagctaggggcgtggacggtgttttcattttcctcggattgtcagaagtgacgcacagggggccggccctgtcattggccccagcggtgccccacagggcccctgccagcctggccggcccccaaacgtcccctggctggtcagacacagcctgcttccccggggacagggcctggatgctggtacggccccacctgccccaagcctccctgagacggggacgcctgcgtgctggtcgtgtgggcgagcaggtggtctggggtgaacacgtgtgtggagccccgtcaggtgagggggagactctgccagcacgtgtcacctcctgtcagtacggggtcatggggcctttccagttcagggccagggcgggaaggtgagggggtgagcgtttggtcgggaagcctgggaggagggaggcagtcacgggggcggcgcaggaccagtgtgggacgccaggctgggtcccgggtcaggcacacagggcccttcaggttctgtgagctgccctcacctccggcctggcatcccgggtcgctctcgcccagaggagttttgagaccggctggtctcaccaagtcccgggcccgccaggcccagctgatccacgacaggaacaccgcgtcccacaccgcggcggcagccaggacccaagcgccgcctacgccagacaaggtgcagatgacctggaccagggagaagctgatcgctgagaa

SEQ ID NO: 14059 - DNA, 1066 bp, Homo sapiens
ggtactacgcgctgtccgccatgctcatcgctggctgcatctacaagtacatcgagtaccgcggggccgagaaggagtggggcgatggcatccgtggcctatccctgaacgccgcccgctacgccctgctgcgcgtggagcacggtcccccccacaccaagaactggaggccccaggtgctggtgatgctgaacctggacgcggagcaggccgtgaagcacccccgcctgctgtccttcacgtcgcagctgaaggccggcaagggcctgaccatcgtgggctcggtgctggaggggacgtacctggacaagcacatggaggctcagcgggccgaggagaacatacggtccctaatgagcacagagaagaccaagggcttctgccagctggtggtctcgtccagcctgcgggatggcatgtcccacctgatccagtcggccggcctgggcggcctgaagcacaacacggtgctcatggcctggcccgcatcctggaagcaggaggacaaccccttctcctggaagaactttgtggacaccgtccgcgacaccaccgccgcgcaccaggctctgctggtggccaagaacgtcgactcgtttccgcaaaaccaggagcgcttcggcgggggccacatcgacgtgtggtggatcgtgcacgacggcggcatgctcatgctgctgcccttcctgctgcgccagcacaaggtgtggaggaagtgccggatgcgtatcttcaccgtggcccaggtggacgacaacagcatccagatgaagaaggacctgcagatgttcttgtaccacttgcgcatcagcgccgaggtggaggtggtggagatggttgaaaacgacatatctgctttcacctacgagaggacactaatgatggagcagaggtcgcagatgctgaagcagatgcagctgtccaagaacgagcaggagcgagaggcccagctgatccacgacaggaacaccgcgtcccacaccgcggcggcagccaggacccaagcgccgcctacgccagacaaggtgcagatgacctggaccagggagaagctgatcgctgagaa

SEQ ID NO: 14060 - DNA, 6672 bp, Homo sapiens
cacttgcgcatcagcgccgaggtggaggtggtggagatggtgagtcccgagggcttgaggggaggaggccggggggaggtggggaggaggtggggggcggcccgggagggctgtgggcctcgtgaggtgggggtggagggggaagtggagatcgggagggctgtggcctcgtgaggtgggggtggagggggaagtggagatcgggagggctgtggcctcgtgaggtgggggtggagggggagatcaggaggtggaggtggaggtggggaggagaaggtggtggcgattgtggcgggggctgccaggccttgcggggtggtcaaggaggcttggttttggaatcgccaggacatcacagaaagcacagagccccgtgtgttgcttgtggacacctcgtgtaacacgggtgtgggtgttgccctagagccggcatcagcatctccgtgtcctccatggtcccgtgtcctcctcggcccgggaccccgtccaggacctcacacctcagtggtgttgccatggtgggtgcacctctgagcacctcccgttttgggtgctctccccagatgggctcaccttcccacggctggaaaccacacatcagcagtcgggacccggggagaggggcactggtcagtgaggccaggctgcagctgtcacgtgggacagacaggccctcggtcagctataggcagggcctggacagagactcgtcccgtccttcacgcctggagaggacggggttgatgggcggaggcctggcattggagcgcttgcccccggcccccaagcatggagctctggatcctggggatctggtgggccccttgtgctggatggaaccatgcctgctcgctaccagcccacccggatccacggctgtgccttcccctccggtcctgctggcggtcccgggactttgtgggttctgaccccacttggatcacgccgacaacactggtcttgaagtcagaacccgcaaagtcctggtttcttccggctcccgtgaccccagcgcatggttttgcaggtcctcaggggcctggactcctggaggtgggtgctgggaagacataaagctggatagagactgtcacgctgtcccccaggaagccacctgtgcccctgcagcagcctgggaggtgcggtctctccagccccgcagccccccagtcccccagtccctcagtcccccagccccccagccccccagccctgggtatggcagaggccccgagcacctgctcctggtttgtgtcgggctgtgagtgaggccaggcacggcttcgtgcctcaccgacaaccttctgtgtttctgtgtcagttcccgtggaactcagttgtcctgtggggttgttcttcctcttgccctgcaggacctttcctaggccgagggctgcaggcctgcgtgacgctggatggttttctgcccagttttgtacactgggcttagtttccatgtggctgtgtcttcggggacgatggctggagtttgtcttgtttggacgaggctttgcgggttcaaggttgtaggggttattattggtgctaatagtcgtatgaataacgttatttccaagtcataaaaccgcttagtaaaatagtaacaaaatgctgcctgggagaaccagccctgccagggggccaggtggggcggccactggggcccagaggaaacaggcaaagtgagcccatggccccagccgcacccccagcccctccgtggtgccagaagcagctccccagctcctgagcaggggttgttagctctgaagtccgggaacctggagctcccagcaccccccatgctcccagccatgtctctggcagggctggggctgcccacccctccgtagccctggccgcagggacaagtgccacctggctggagaggggcgtctgggtcgctgccattcagtctggcatgctgtttatttttttaaaaaaagttttgagacagagtctcgctctgtccccaaggctggaacctccacctcctgggttcaggcaattctcctgcctcagcctcctgagtagctgggactacaggtacacgtcaccatacctggctaatttttttttttttctttgtatttttagtagcaatggggtttcaccatgatggccaggctggtctcgaacttctgacctcaggtgatccacccgcctcggcctcccaaagtgttgggatgacaggtgtgagccaccgcacctgatctggtgtgctgttttaaatactggtgcttaacaggcacagctgctcccaactcccatgagccgggtgcggcgggtgagacacagggatcccgcacggcgggtgcggtgggtgagacgcaggggtcccgcatggcggatgcggcaggtgcggcgggtgcggcgggtgagactcagggatcccgcacggcgggtgcggcgggtgagactcagggatcccgcacggcgggtgcggtgggtgagacgcaggggtcccgcatggcggatgcggcaggtacggcgggtgcggcgggtgagactcagggatcccgcacggcgggtgcggcgggtgagactcagggatcccgcacggcgggtgcggcgggtgagactcagggatcctgcacggcaggtgcggtgggtgagacgcaggggttccgcatggcggatgcggcaggtacggcgggtgcggtgggtgagacgcagggatcccgcacggcgggtgcggtgggtgagacgcaggggtcccgcacggcgggtgcggcgggtgagacgcaggggtcccgcacggcgggtgcggtgggtgagacgcaggggttccgcatggcggatgcggcaggtgcggcgggtgcggcgggtgagactcagggatcccgcacggcgggtgcggcgggtgagactcagggatcctgcacggcaggtgcagtgggtgagacgcagcagtcccacactgtggatgttccgggtgaggcgcaggggtcccgcacggtgggtgcaatgggtgagacccagggtcctgcatggcgggcgctgaggttgtgctgtggcttctccatgtgttctgggtgggtttcccatggtgccaagcccccctgagcatagacaatgacacctgtgagcgtggatcatgcagccccatggggcagtgcctcgccctgagccgtgtgtgccaggttggtttgtggctgtggccttgccctcacagctgcccttgtgcccggtcggagggtcccggggagggacatgagcagagcgtgtgtgcggcgtgactgcccatcgtgcgctcacaccttcctggccactgggcggggggcctgagagccagagggggcctgtggggcccgggacgcgtggcctttcccaccgctcagggcggctcggtctctgggtaccgggctggtgttggagccatccgtggttctgtgcacaccgggcttactacgtgcttgggaactttctaggttgaaaacgacatatctgctttcacctacgagaggacactaatgatggagcagaggtcgcagatgctgaagcagatgcagctgtccaagaacgagcaggagcgagaggtacgtgggggccgtggccacagacaccaggctttctgagaagtatagccgacttcgccgagtcttttctgggaccctcctgcagcccacgagggtcctccagagagcatgcctcaggtactgcgtcgcaggctcagcccccagcctgcgtggaggtggcagaggccctgcaggagcacaggagtggcgtcaaagccagagctcatcggagcctgggcgtgcgggtgcctggttagaggaacggcagcctgccagatgcatgctcatgtgcaggaagggacgagggccgagacctttgaacttagcttttctaaccgagcagcgtgcaggcaggagacatggggaccctccccaagggcagtgccctctgacagggtcagcggcttctgagccggatgagtgcccacagctgcttacgatggctgctttgtctcacagcctgaaaccgtggagcccctcagtgcccttccccgcagcatgcacagatttctgtcctaagaccaagtgggaggggagagtgagtgtgcagggagggagggaagcgagctggaggggagttgccaacccccccaccccccaccccccgacacagacctgtgcagcctccgtgcgtggaagctggccgcctggctgcagcggctttggctccgtgggtaactgtaggctgctgaggacgtctgggtgtatccacctgagttatactggcctgggccccatggccactgtgagaccccaagggcaggtgtctttgtggtcacttcgcactggaggacagcacgggggtcacctggtagcgggatgctcagctctgtgaggtcacggcctcatggggtcttcgtgggtcccaccaggctggtatcacacacgtgtgtctgcagaccaggtgcaggtgttggttttctgagactgcagtgacggcggaggcaggggcaggggatttgcctgccctggggccttggcctcagcaggaacctgcagtacacgggtctgcgtgtggggccatatgtgctgacagccggaatcactaagcagcgactgctgctctcccccaacagagaaaggcgtgtggagctgcggtcctgtccactcccagaccccgggcaggtcagggtgggcacagatgcaggacacggggggccgcccagcttgtccgtggacagagaccccttccacgggggtccgggcagccgggagtgtctgggaggacccacatcctctgttttctgtccaggccaggtccctgagatccggcagggtcgccctggcgtcacaagggttcagcccgggtccagctaggaacaagaatccacccatggcttcatgggaagttcagtgtggagagtcagcaaatgctgaccgaggagggaccgggagcgggaacagcaagctcgagctcgaagggcccctcctgggccaggtgggggttggaggtgtcaccgctctgcagaagggtttggatgagctgctgtgcagacgctgggtggacaccctctagtgacttacacggtggccctcgggccaggtgggcggcgctggctctgccgagagcgggcagcccttgggctctggtttcacgttcaaggccatgggaaatttaggctgggccgggcgccacaatgagtagaggcctggggcccactgtctgtgtccagagagggaggcagccccaggccctcccccatctgtgccaatctcttccctttcgggaaggaccgacatccaagttaaacagttttatccagggaagaagaacctggtccagtgaaatcactctggacctttggctttttaaaatcaccccggggctcacaaactcctgatgcccctgggacgagtggctccccgggctgcgtcacaaactcaggcggggctccagccacagtgggagaggtggccattccagtgtgtgcataaataccacttccaaggtggcacccgtgtctgggagctcccattggcctacctgtcaggctggccacgacagcatggagggcgtgaagggtgcagggaggaatgagaacccagtggagggtgtttaaccaccaggggctgcgccattggtgcgatctcgcggtgagggcgccacttccccttcggcgcctacagctaggggcgtggacggtgttttcattttcctcggattgtcagaagtgacgcacagggggccggccctgtcattggccccagcggtgccccacagggcccctgccagcctggccggcccccaaacgtcccctggctggtcagacacagcctgcttccccggggacagggcctggatgctggtacggccccacctgccccaagcctccctgagacggggacgcctgcgtgctggtcgtgtgggcgagcaggtggtctggggtgaacacgtgtgtggagccccgtcaggtgagggggagactctgccagcacgtgtcacctcctgtcagtacggggtcatggggcctttccagttcagggccagggcgggaaggtgagggggtgagcgtttggtcgggaagcctgggaggagggaggcagtcacgggggcggcgcaggaccagtgtgggacgccaggctgggtcccgggtcaggcacacagggcccttcaggttctgtgagctgccctcacctccggcctggcatcccgggtcgctctcgcccagaggagttttgagaccggctggtctcaccaagtcccgggcccgccaggcccagctgatccacgacaggaacaccgcgtcccacaccgcggcggcagccaggacccaagcgccgcctacgccagacaaggtgcagatgacctggaccagggagaagctgatcgctgagaagtacaggagcagagacaccagcctatctggtttcaaagacctcttcagcatgaagccgtgagtgtccgtgcgtgtggcctggggggaacagatcctggcagtgctggcccggcagtgaggacagagtcccttccctgaccactgaagagcttcggggcaaccctgcaggccagtgggcccgttagagaacagggagccgcctgagtgggcactgaggggtccttttggtgccaaggccgggccctgagttcagccctgtggccgggcgctgagggatccttctagtgccaaggccgggagtccttgtaagacctggg

SEQ ID NO: 14061 - DNA, 586 bp, Homo sapiens
cacttgcgcatcagcgccgaggtggaggtggtggagatggttgaaaacgacatatctgctttcacctacgagaggacactaatgatggagcagaggtcgcagatgctgaagcagatgcagctgtccaagaacgagcaggagcgagaggcccagctgatccacgacaggaacaccgcgtcccacaccgcggcggcagccaggacccaagcgccgcctacgccagacaaggtgcagatgacctggaccagggagaagctgatcgctgagaagtacaggagcagagacaccagcctatctggtttcaaagacctcttcagcatgaagccgtgagtgtccgtgcgtgtggcctggggggaacagatcctggcagtgctggcccggcagtgaggacagagtcccttccctgaccactgaagagcttcggggcaaccctgcaggccagtgggcccgttagagaacagggagccgcctgagtgggcactgaggggtccttttggtgccaaggccgggccctgagttcagccctgtggccgggcgctgagggatccttctagtgccaaggccgggagtccttgtaagacctggg

SEQ ID NO: 14062 - DNA, 41390 bp, Homo sapiens
ggagcacgaggaggacgaggagagccggcggcgggaggccaaggtactgccaccctgcccgtgcccgcccagtccccgccccgtgtgtcccggcagggttagatcacgccggcaaggcagttgcttgtcagaagagctgccctgagctctggtatcatggccacgtccagccctttcttcctgggagggctcgatggtgcctgccctgcagctcctgtccaggcctcttccctctccaccgtccggggaagcgtgacacccccatgcatctgggtggccgggttccctgtcgagaaatgaacttggggtgttttgttcgttctgcgggagcggccccatcccctgctgtggagaggagtctgaatggtgccgagaggccgggacgtggccccttccagagggtgctgtggcctcggtgctcccaggggccgccctccttttcatttcctgtccaggacacttagcctggtagcattttccctgcagttttattccctgaggatttgtttccaggaatccgtcctaggaaacgaggggggtgcagtggggaaaggtttcccttgagtggtttctgtgggtgacgaggtgtggaaaccccttgagcatcctcgggagggttctgccgtcctgtacagacgggttgcctgagagccaccctgaggcctgaggccctgaggtgacgctcacaggcgagaaagaccctggacccgtgttgggggagatcttaggtcctcgctgtgggggtgcggcgggtggctcagtttcttctcaactccctctgctttttaaatcttctttcaaatatgtctgtgttgctctagaataagatacaaaaaacaaaaaaaaataatccaccggaagaaaccaagcagcgcaggccctgctctgaagccgggcgacggcctcccccagtcttgacacaaaattgtcatttcccgagtcagccccgagcctgtgcccccctccttcggcagacagctaagggcatacgttggctttttagggtgatttttaaattcccctattattttccttaactttctaactctaaaaataccatcaggagatccctatcttctcagaagggagggttttgtagtgccaggtagaggccagtgagcaggaaggaaggaggtgctgagccaggcgcccccaggtccagggagggtgggcccccctgctgcgtgtgacctccaccaagtggggcgtccgtcggccggctccttgccctcccctgcatcctcccagcctgggctctgcgctttgcgtcgacgccacccctgagtgcctcctgccagcgtccagtgttctgctgacctgggtcccacacagcagtcgggaagtcaggccgctcaagatgtctctttccttccttttactgtaaacacagcggaattaatactgcatttccaaaatacttgaagacatttggttttgtttttgagaagcctcaatctggggttgaagtaaccggagacgagggacgtgaccgtgagaccaccttggggtggggcctggcctgatgagggccctcagccctggctgttgtcccaggacagggtagtggcctcttcagaagctgcatctctggacctctttctggttcccctgctgggtccttcccggctcggggagcttgtggccgccccccctgtctgtagctcggccagcccttggggtgggaccatcactgctgcacgtggacgctgcggaattgggtgttgccaggctcagcactcagcacctttctgcacgtggatggtgtggaactgggcattgccgggctcagcactcagcacctttctgcacgtggacgctgcggaactgggtattgccgtgccgcacgtggacgccgcggaattgggtggtggtgtgccgggctcagcactcagtacctttccgcacgtggacgctgtggaactgggtattgccgggctcagcactcagcacctttctggggtttcacgcatgctgggcactaccttgaggcctcatgggctcaggctggtactctggcaccaaaactcaggagccacaggccttccctgtctgtccgcctgtgtgctggagtttgtgtcctagggagatgttggctttctccagggagcaggtgtcttcccacgggcctggtccgagtgctccgggaacaggctttagctccagctcggctgggctcaggcaccactggcctggacatccagctccaacccctctgcctgatggagcccagcctgccatgaggtgcccatagagagcacaccccagcttctctcaccctacttggtactgagacatgactgaaacgtccaggcaggtgtgtttgttcatggcacactgtgggccagggcccaggaggttcccacctggaaggctctccctggccctccctggcaaccctacccccaggctggtggctctcaggcctctgtccctcagggacaatatgcaggtaccccaggctgatgctgcctgcgtttcagtcgtggagggaccagggcccgtgaccccagcaggcctgttgtttgacggtggcgggtttcagttggcagtgactccttcggctcccttaggggaccgtggctcggcccctggggtggaagggcaggggccgcccctggtcctctttgccaggctcagaggctcatccccagcagacctgctcccattgaggagccttttcaagggcccaggcatctccagcctcccgcgcctgaaattgggtcaggttgagccttaaaagttgcctttaggcgcgaaccaagaggccaaggccggccatgcccttccgtgaggagtcaggatcccccgcctttggccgagaaccagcttctgactcgcctgtcacggggctgcgggatttgaggctgagcctggagggcaggggcccctgtgtggaccgcgtctctgcctggagctctgcctgtcggctcctgcgttagctgaagcctcgctgggaagtcacagcaacaattgtccctggagccttgctgtcacctctgccctgggctctcagttttatccaatgagaatgtcccaaagccggttctccaccatccgccaccgcttctctcgtttgcaccaagaacaaagcatacccagatttggagggcccagcagcggcccccagccccgtcaccctctcctctccagggcccccgtcagaagcaagtcgctcccctgttgcttcccacctagggctcagggaaccaagtgaatcccccaggctctcagatccagggcttcccacgctccgagctgctcttacattatttttcccagggtcctaaagttggtggagccctagagccctgccctggccccagccttggccagtctgtgggaggcgttccggcacggtgaccccagaagccaccctgtttgcttttgtgatgtggtgttcagcgtgctctccctgggagctgcccctcacctggtcccctgttcccatcctccccaggcctgggctgtgtgaaccccaggatcgaagccccgcacggggcctgttctgatccacattgtggccactgttcacaggaagtgtcttcaaataaaaccttcccccttttccgtattgaccttgagacgttttcctgttaaaacgtcaccttgtgctggcaccagccgtcctccaggtctgagccacgtgcctctgctcatggcgggagtggggctgagcaggcagtggggatggagctgaaacttctaccccagcctggcccgtcccgagtggagctggggagctgcctggcaggcgctggcctgctcctggctgtgctgctgacccttgcccatgtgggttttctcagggcacagggtgtgtccccctctctggcacaggtgtctgaagcaggctgcctgctccgtgctggggcaggcggggtggcccccacgtggatatctgaacctttgctgttatctcgtggtgacctccgtgcccggttaagatgtgtcagtttctgcccagggccgacgctgagctgtggattttttttttttttttttttagctttatgggcagcagccgtctcatccctccgctggctctgcttccattcctgaagtctcaggctctcccagggtgtcagatctcaggccctgagccatccagggaacggagccgggggccctctcgttctccctcttgttttttccataacttttccagtgtaacaggtttccctccgtcggggaggcacagcggagcagctgcatcttggttctctgccaaccatgtggttctgctcccctcccctaagccctcattccgggatggtcaggggtcctgtcctgggcctctctctgaacctccatctgttctgggaaggactcctgccccctcctgcccccacggccgctttgcctgcccagggcctgagtgcagcctggggagggggctccctctgggtgtggggtacgagcccctgggacacgctatgctctgtcgcaggctccgcgcatgggcaccttcatcggcgtctacctgccgtgcctgcagaacatcctgggcgtcatcctcttcctgcgcctgacgtggatcgtgggggtggctggtgtcctggagtccttcctcatcgtggccatgtgctgcacatgtgtgagtctcccccggccaggtgtggctgtgccttcgggcggtggcagctggacagtagggctctccccagatgccgtctcccctggccgctgtggttgtgccttcgggcggtggcagccggacagtagggccctccccagacgcccgtgtagacgtcgttcagcgccgtctcctccacgagagccgggcagctgcggggatgagatgccacactgtccggggttagtgctggcgtgttgactggcgtgctggcacctcatttacccgtgtctgcggacaggcatctcagccagtggtgggtgtcatggggcggcacccgggggctgaggcttccaagggaagggacaccctgtgttttgatgacatcacctccagtttggaaggaccttgggcactttcaggggtcgctgtcataggggaaggggtgggaaccaggacacgcatgcctggtgcccgggagcctccaggtcctgtttcctagccactccattgagatggagagccctggagttgggggctggcattcggcgggagccgggtcatagaccctgacttgggagtgttgcgatgccggcaggctgttggaaaactctcctcagatggctgcctgtctttttgcagacaatgctgaccgccatttccatgagtgcgatcgctaccaacggtgtggtcccaggtaaggggtgcccgccagccgcggccctgagtcctgttagaggagtctgtgttttgccgcacggcaaccgcgaggaggccgcttggcgaggccgggccgggggctgcctgggggtctcagccgggccttctgcgtgttctccactggctcctctggcgtttgagccgtgaggtcacggctgtttggttttcttccccattttgctgcgtggtgaccgtctcttgccagggtaggcagtgcccaccaggcagcgggctggggagggggaggcacgggcgattccagtggctcctgtagcccagcgtgtgccataggctgagttcttggaacctgtatctcacgagggaaggtgaagacaaaacactgccctgaccttgttaattagtaataagttaattacaatacataataactaaataactagtgaaccgagatgatattaattagtaataagttaattacaatacgtaataactagtaaactgagatgatactgttaattagtaataaacgaattacgatacgaaataactagtgaacggagacgctgccacgtctgcttctgagtgcatgtgtgctgcgcgtgttaacggctgggcttgctcagcaccaggtcctcacgcagctggtccccatccccacgggggcatcgcttggtgctcagcggacttccccggcctcaggagagcacgagggccttcaccaggggtctccctccgcagccaagggaccagtctctgcttcacgatggccgcgtccattaggaccccttccacatgccacacgcactgctcagagcagggagagctgtgttctccaggcagccctggggttgcgcccggctttcccgccagtgatagcgtgcgtggttcacagtacacgagacgactcctgaacatcctagtttctcttttgcctttttcataagcaaaacttagtggaagtgggggctggggctgccactgatgtacgcgggactttttctgggacctgctggggcctcctgctccccagagagccttatccctgatctcacctggtcctcatgtccatgagagcgcgtgctcttggtgtggaacgtgtgccgagcctcgggaggggagagttcaccgtggaagcgtctccatgtgctgctttgcgggtggacgagggtctacacgctgccttcgcagagacaggccctcctttgcccgtgaatggcagcgcagaccgcacctcgggtccgagtccaagtgcgcccctgacccgcggctgccgcctttgtctccgcagctggcgggtcctactacatgatatcgcgctcgctgggacccgagtttggaggcgctgtcggcctctgcttctacctgggcacgacgtttgcaggggccatgtatattttggggaccatcgagatttttctggtaagtgtgctgctttggaagggttcccaccccacagtctgtggcaggatgccaaggggccctgcctgacccactctgtggcacacacagcacactgagccatcctgaccccactgccctggctgcccctgggctctcctgggctctggccatggcggaagccactgggcagcgtccactcagcagcgacctgtgtcccccttgagcaccattgctgccctccgtgaggcgtgcctggcatgagctgggtagacatctggactgtagatctgagccccgcgtaggtgcagtcctgcagtcggagctgttttaggagcagggctggaactcggcttagaagaaccttttgccaggatcccagcctcttctctgcctgatctgggcacttggccgagggtcccagagcccagcaatgtacaaccaggtgatgtcatcaccttctcaaaacaggcatgctcaaagcatgtcccacatcacctgagcacagctgagagctgtggcctgagttccttggtcctcgtggggacgggaaccgcccttctctggccgacgggtgctgtccttcctgctgaggttctgaaacccgctgtccctgcagggcttcagagacgctcacctgagcccctgtccccagtctttctgcccctccctctgctgccagacctggttcctggcctcctgggttcctgaagagagccacatggccaagaaggttctgaaacctttcagtggggtcgcacccacacccgtcccaacccgagtcccctggccatgtccctccatctttccacctgccccgggtgccgtggctgccgcactcccaggatcccctttggtgggggtgggtgccatgccctccatgcctgctgcaccccagtcctgtcctggtcttgagggagctgagcagcactgtctcacgtctccgtcccttcccttgaatctgggcagaacagaggttgccccccgccggcgtggtcagaccctgtgtgtgtccaggacgtccagccggggtgggccgagctctctgggcagcagtcacattcctcttagcagaaggtgtttcttttgagtgcggacatgcggatgccccgggtcctgaagttgctttactctaaggctcccgggtggttcctgggaaacgttcaggcccctggctgtccatggcctgtgcgctgacccccgcgggctccgtccctcgcctgtgcgctgacccccgcgggctccgtccctcgcctgtgcgctgacccccgcgggctccgtcccttgcctgtgcgctgacccccgcgggctccgtccagcacggatgcgtcccgatggccccggcacctgttgggaggaggcccctgtgtggcgctgggggcttgcgggagggacgggcactggggagttgtgtccggggacggcctcccgaccggccttgttcccacagacgtacatctccccgggtgcggccatcttccaggcggaggctgcaggtggcgaggcggccgccatgctgcacaacatgcgtgtgtacggcacgtgcacgctcgtgctcatggccctggtggtcttcgtgggcgtcaagtatgtcaacaagctggcgctggtcttcctggcctgcgtcgtgctgtccatcctggccatctatgccggcgtcatcaagtctgccttcgaccccccggacatcccgtgagtctcggggcctctgagccgtgggtgggtgtggggctggggccaggtcccatgggctctgcccgcctctcgtccatcatccttgacgccgagctccccgcaaggggtgggctgggtgtgaccgtggcgggaacccccgtgggctcgttctggggattacaggaaacccaacggtgaggtgggccgaggtaccctcgtggccgggtctgagcatgaagaccctcctcagtggcaggagggctggtgaggggtctggcaggtttcaggggtggccggtggccctgagcacggtcaggtgcagtgagcgtcatgggtgtggccctggctgctgctggggcctgggtgtcttctccctcccagaggtgcttggaggggctcttttcttgtccttttggaggagcagctgggaggcggcccagggtcctggaacatgggagtggccaccagagcccgcagggagcaggtccagaaagggccagcagccaagccccttgaggctcccgcggttttgccgtctctgcgtggagggagcccctgaaggaacagcctcatagaggcctcaaaacagagggaggcagaacagctgcaaccccacaagcccgttttagggaagcacagctgccctccccctcggggacccgtcctgagaccccctgccgatgcttgacgctacggccctgtgtagactgttttccacgtacaggcctggcttatacgtcgggggcggcactcctgtgctcttggccgttggcacgtggcacgagggtggcttgaactcagacactgagattgtgacagctgacccggccaggacgccgccgagggcctcggggagggagcggctgcagcgtggctgtgctggcgcggggggaggttgctgggttccacctcactactcggcaccgcgcggtggaaaacgtgtgaattgtttacgtctagaacgcttcatttagcacgtttggaccacgggtggccgaaccatggatgaggggacggctgtacagtacagcgttcctgctgcagcctggcctggtccccggtccctggtccccagtccccggtccccagtgtgatccctggcccttgcattcctgctgcagcctggcctgggcccggtccctggcgtgatctgtggccttcctgtcttgggaggtgcagggtgccaggagccactcgcgggcgacaccatgggtgcccgttgggggagctgggtggggcagtaaaagccacttcggtggcagcacacgtgccgtgcctccctgtcccgcccagggtctgcctcctggggaaccgcacgctgtcacggcgcagcttcgatgcctgcgtcaaggcctacggcatccacaacaactcagccacctccgcgctctggggcctcttctgcaacggctcccagcccagcgccgcctgtgacgagtacttcatccagaacaacgtcaccgaaatccagggcatcccgggcgcggccagtggtgtcttcctgggtgaggctcacagggctgcagctggagctggggggtggcgggggcagcaggcgctggccctggtggctgctctcgccttagagtcactctcagggccccaattcctcctgcctggccgagccccttcccagctgctgctgatgagcctgggggtccctgtacacacccctggcagagccatagaagccaaacacggtgtggcagggagacagcctccgtcatggtcagcaagctggtcttaatgctatggatttattttcatgacctcctggcagcatgtatggggaacttgctgtgttaagaagggagtggtagctgggcggtaacttccccctctgtgtatccttctctgatgagaggctgcctcggacctgccccagggggttgagggaaaaggacccctggcagggtacacgagacctgctccagaacccgagacgggaagcccggactttccagaacccgagacgggaagcccaggctttccagaacccaagacaggaagcccaggctttccagagccctagagaggaagcccaggctttccagaaccctagagaggaagcccggactttccagaacccgagacgggaagcctggacttcccagaacccgagatggggaagcccggactttccagaaccctagagaggaagcccaggctttccagaacccaagacgggaagcctggactttccagaacctgagacgggaagcccaggctttccagaacctgagatgggaagcccggactttccagaaccctagagaggaagcccaggctttccagaacccgagacgggaagcccaggctttccagaacccgagacgggaagcccaggctttccagaacccgagacgggaagcctggactttccagaacccgagacgggaagcccaggctttccagaacccaagacgggaagcctggactttccagaacctgagacgggaagcccaggctttccagaacccaagacgggaagcctggactttccagaacctgagatgggaagcccaggctttccagaacccgagatgggaagcccggactttccagaaccctagagaggaagcccaggctttccagaacccgagacggggaagcccggactttccagaaccctagagaggaagcccaggctttccagaaccctagagaggaagcccggactttccagaacccgagacaggaagcccggactttccagaacctgagacgggaagcccggacttccccagaacccgagacggggaagcccggactttccagaaccctagagaggaagcccaggctttccagaacccaagatgggaagcccaggctttccagaacccgagacgggaagcctggactttccagaacccgagacgggaagcctggactttccagaacccgagacgggaagcccggactttccagaaccctagagaggaagcccaggctttccagaacccgagacggggaagcccggactttccagaaccctagagaggaagcccaggctttccagaaccctagagaggaagcccggactttccagaacccgagacgggaagcccggactttccagaacctgagacgggaagcccggacttccccagaacccgagacggggaagcccggactttccagaaccctagagaggaagcccaggctttccagaacccaagatgggaagcccaggctttccagaacccgagacgggaagcctggactttccagaacccgagacgggaagcccaggctttccaggagtatgttgttccccacatgaggcttctctttagtgctgaccttccctccgtagacgcagacaggcagctttcccagaggtaccatctcgaaagcgtgtttgaattggagcctgcttgcggcgcacaagctgtgacccttcccctccggccaccagtggcacctgccggggagtgggcggccccatggcgggggcactgcacagaaggtgccagaaacccatgggatcttccttgcccggcagagaacctgtggagtacgtacgcgcacgcgggggcgtttgtggagaagaaaggtgtgccctcggtgcccgtggcagaggagagccgtgccagcgcactgccctacgtgctcaccgacatcgcggcctccttcaccctgctggttggcatctacttcccttccgtgaccggtgagcccgctgctccaggcttccccttctctttctttctctccctctcttttttgaggcaaggtcttgctctgtcacccaggctggagggcagtggtgtgatcacggctcactgcagcctcaactcctagacacaaatattcctcccacctgagtctcccaagcagctgggaccccaggcacccagtaccacgcccggctaatatctgtattttttgtagaggggggcagccgggaccccaggcacacggtaccacgcccggttaatgtctgtattttttgtagacgggggtctccccacgttgctcaggctggtctcaaactcctgagctcaagccatcctcagcctcccaaagtgctgggattacagacgtcttgagccaccacgcctggcttccttctttctcttcctttgtctttgtccatttctctgtctctgtcattctctcctccggcactctttctctctccccctacccttttccctctctctctgtctgtctctctctctctctctgtctccctcttcttccctccctccctctctctctctctgtctgtctgtctgtctctctctctgtctctctctctgtagtgtgttccttcctgcccctgcttatcttgcctgtttggctcaggggaagtggctgaggtctctgccctgcgtcctgatggatttgtgagaagcctgtctgctgctctcccaggcagccctgtgtcaggagaagctgttgtagggttgctgggaacacctggcaggctgttaggagacacctaggagtggcctcagtgtgagctcagaggccggggacctcggccctctgtgtcctcctcaaacagtgggccttgttccggcggtgggtggggcccttggttgttccccagggggtggggccaggccccgtgctcttcgagtcgcacacacacgcccccggctgtctccactcggccttcttgtcgggacgcccctgacaggcgctggctgcttgtgcagcctgcagctgcccttctggtcccttctggtccctcccacgtctgctcccggacttcatctcagcacatccgaaagccctggagcccagggtcagctgcagggcctggccacagcgctggcttctcgtgtttcccttgcctccactgaaggtgggcccgtcttgctatggagggggtgatctgccgggggtcctctccctgtacctccgctccagcctcccccgtccgtctgagtgcgctccgcgccgtgggtggagggcgtgggggcagagcctctgcgtggctcctggtgtctccgcgccgtgggtggagggcgtgggggcagagcctctgcgtggctcctggtgtctccgcgccgcgggtggagggcgtgggggtagagcctctgcgtggctccgggtgtctctgagccgcgggtggagggcgtgggggcagagcctctgcgtggctccgggtgtctccgcggcactggattgtgggctctgctgcctcccaggccaccccgagcaatgggtgcttcaggctgcgccttggatgggaccgagccaggcgtgaagtggcccccaccgacccggcttcccagagctttgtaggagccgattgtgtggaaacatccccggccgtggctccctagagcaaggtggtgccacagcgggaggggtcgcagcgtctgctggcctggctggctgggctgagtcgttctaggatctcattcccaaagtccttaggtcctgggggcctgtgagccattgctcagcaccgtctctgggctgacccttggccatgggattaacacaggctccagagaagccctgggtgtggggggcgtgggggtcagtgacggggtcggttctcgtcctcggatccaggggagcagtagacgtgggtgctcatccgcgtgcctgggcccgcatcccctcagccgcagtattgcagcgtgggctggcggagcttggactgcagcctcggctgcagctcacgctcggggtctccccagagaccgcctttccagctttctgggcaggggctgccatcacatggcactgactcctcagatgggtctttgcagcattttccatgttcacaggtatcatggcgggttcaaaccggtccggggacctcaaggatgcacagaagtccatccccacggggaccatcctggccatagtgacgacgtctttcatctgtatccttggaggggtgcaggcgagggttccagcctctgcctggggggaggcccccatgccctccccggctcagcatcataccctcggccaccagcatgtgacttcccaggttaggctgtgctctcaccacgtcatcctccctgggagacggggcaagggctgctgtcaggaccctggcttcttcaccactgtgtgatgcgatcgtagagaaaacagaagcagtcaccctgccgcgtgtggacagtgatgcgcagcggtgtgtggggtgtgccgccggcaggctgggcccgcggggcctctggcttctcaatcccaaggctgcctctttccagccgagcattgtcccctcagcatggtcccctgccaatccctggcggtcaagcaccaggccaggtgtgtgtccaccaccccagggccccgttctgtggcgctggacagagccccaggagggtgcgctgaggacacgggggacaggacgtgcccgggatgggatgggatgcagaacggtccccgcccacctggatcctgcggcccgctggccagtgcatctccccacccaccccaccccaccccaccccaccccccgtacctgaggaccctgcacccacggacctgcctttccttgacgagggctgtggatctctcctgcattgtgctgtttggggcctgcattgaaggcgtggtcttacgagataagtacgtttccacctgcagttttcgtgcaaagcctgtagtcttcaagggttttcctgaggatgaattcggctttgaaattacatcgccctaggacttcatgtccgcgtgcagagctgaaggcgtcctggtcccagggttgggatcccttggtctgatgtgtcgtctcttccgctggagcctagggcctggggaaccgttcagagccaactccaagccctgatgcggctgggggcgcaggcccttcctggggaggccacaggggtgtggacgggtgaggcttggccctgggagatccctcagccctgctggcaagtggagaagtagtggggtcccaggcaggtcatcactgaccctgcatcctcatggggtgtgcgtgtctggcagccccaaggccccgggggtcctgggtggtccctgactgaagctgatgccaggctgggtcttccctgctcccaagagcgaccctgaggtgagcaggaccccctcccccgctgaagaccctccagagcattctggccatgctgggcagagcctggtggaggtttcagccaacggggactggaggccgggcctcagctttccaaggagtcgcccccactgcactgggcccctcgctctgggtgggagaagacattttgtctgactcaggctcacttctgaaagccgcccgcccgcctgcccgcctgcctgcaggttcggggaggccctgcaggggaacctggtcatcggcatgctggcctggccctccccctgggtcatcgtcatcggctccttcttctccacctgcggtgccggcctgcagagcctcacgggggcaccgcgcctactgcaggccattgcccgtgacggcatcgtccccttcctgcaggtgagtcccgcaccctcgtcggggggaccctggaaggtcagggtcgggggctctcctcccctgcgggatcctcacagtgccgtgtgtgggacgcatgcccgcggcttggaccccatggtggtcattctgcccctggccactgcacagagcatgggagtggtgggaggtgggtggtgggcagaggcaattctagccctcctgcctgcaggtccctccgagctcggccccgggtgtgtcaggagcggctgtgagggcccacagccacgtgtccagaggtgcctggtctgttgtctggtcagaagccctctgcctgcctgccacatctttctctgtgtggctgagctcttcagcccgtgggaggtggcgtcaccagccacctgcagccagtgtgtgtggctgctctgaggattgcacggacgcccgcatgggtcctgtccgtgtgctgtgcccagagctgccgattgtggctcctcctgctacctgggcccaggggcagctgtgggaaggtcgtggatggcagagccatccttgcccgtcgctggtccctcggcagggtgccgacccgcagggcctttgtgtggttgcatcttcagtcccagccgggcctagggcatggtgtccaggaaggggacaggcacacaggccccgtgggcctcagcttctgggaggtgagggtggcctgatgagaaaggtcaccacagggtctggggaaccgcgagtgccctggagacgctggtcctgtgttgtgtggtcggggaaactgaggcgggggggcaggctggggccacacaggttgcaggcaagccgggcgtaggcacagctctgaagcctcctgggctgcagccctttgtcagggcttcttcccaggccagccgcgtgatgtcccggggacctactgtgaaaggcgtttctgctggtctgtgtctttaagattcatctgggctagacctgaccagcctgcagcttctctcctaaaagggtggtgtcatctgccccatcttcctgcccttctccctgcaggtgtttggccacgggaaggccaacggggagcccacgtgggcgctgctgctgacagtcctcatctgcgagactggcatcctcatcgcctctctggacagcgtggccccgatcctctccatgtgagcccccacaggacggggacctggggatgggtgtatgggcctggagcgtggggcagtgtggatgggaggtcctgctcaggacaagcagtagacaggcatggccagctgtgggcagtcaggatcctgccgggaagggagttgcgccggggaagacaagtacacaggcctccaggcagccgcccgctggggtcagccagggacagtgtggctggacagacggctgctggggaagggacgatggcccatctcttgatggaccaggtggtcacaggatggctggaacctgagggggcctgattcggaatcagtctgagtcagctcacgtgcagagacagacatggggagacaaggcgcaggtgggagggacagtgacaagggtggtctcccaggtggcagtgactgggggctcaggggggcccagtgggcccgtatcagtggccggccgtccctgcaggttcttcctcatgtgctacctgttcgtgaacctggcctgcgccgtgcagaccctgctacgtacccccaactggcgtccacgcttcaagttctaccactggtgaggccactcagcacgggcgtgaggagccccacaggctgggacactgggtgcctctgccactggtgaggccgctcagcacaggcgtcaggagccccacaggctgggacactgggtgcctctacaaggccagctgctctgggcctgaagaccccagcgcgtccttgactgttcctttgcggagtaagcccctgcgcagctgatgagactgcacctgaggaaggcctctggttacgaggatgcccaggtgtctgcatgtgccttgtacctcccgtggtcagcccagccttcccaggcttggggcgtagcccatcagggctgtgggtcttcttaactcccctccccaggaatcaggcgctgggtggacgcttcagccccttgttgcatgcacagccgaggtgctgtgtgcacgctgggagctggagctatgtactgggttttggagtgacagctcccacaggggcccagggagccacgtcacccctcagaggtggttgagtacagccatggtcgtcaggcgtcagtgactgttttcctagtgttaacagagagttttactgagggaggggcagtgtccgtgtggtggtggctgaggtgtgggggctgcatggcgttgggccgccccgagccacttgccccgcccccaggaccctgtcctttctgggtatgagcctgtgcctggcgctgatgttcatctgctcctggtactacgcgctgtccgccatgctcatcgctggctgcatctacaagtacatcgagtaccgcgggtaagcgctgtcagccccccttacagacccggcgcacgggagggcgggcccctctcatgctatgcctggggcagctccctggaggggcctccctggggcttgagcgtcgtgtgccctcacaggggcagctgggagcacgtccaggtgggctgtgttgtgaaagctggggtttccctcccacttccagccaggccgaggtgcctgcacttgtggacagggtctccagcctggagctctgtctcgtgccgtcctcagcaggcggtgagcccacggctgactattcctgctacgtgtctcgcgaggtgtccccaggttgtgtctgtactcactcggcagccacaggcgtccttccccgtgccccagcacccaccctccctccacctgcacccgcctcgtgcccggggtccagccacttccctgtcatgggcctcctgtcccccgtcctgtgaggaaggcacctcacgcatgctggacgtagacctcgttccctccacagccacagcaccctctgacccggtggctcctaggacgggctcccttcagggcaagggtgggcatggaggcctccctcctcatccagggacttttcctgggggtcctgtttgccccaactcacctgcccccagaagtcccctttcccaggtgggagaggagcctccaggtacgcggctggacaaaccccgacttcctttcccacagggccgagaaggagtggggcgatggcatccgtggcctatccctgaacgccgcccgctacgccctgctgcgcgtggagcacggtcccccccacaccaagaactggaggtgagcaccgcccatgccccgtggtcctcagacgcacagaagagctgtttctgaggtcggcctttgagtggggacctttgagtctcaggggcctctcaccttcagccgctcaggcaaggtctggggtgtgaacactgcctggtgcagagcggatggcgcagctgggggccgggggtgtccctgctgcagggtgggggtgtggggagccggcccctctgccagcacagccctgggcttggggtgggagagggtggctcctgctgaagcaaaggccatctttgggaagcctctgcccctcagggcctcggcgggggcctcaggtgtgtgccccgggccattgtcccctcaggggcctcggcgggggcctcgggtgtgccccgggccattgtcccctcagggcctcggtgggggcttcaggtgtgtgtcctgggccattgtctcacctgtctagcatgtcacctgtcccacctgtctaacctacctgttctcctgtcctgcctggctagtgcccacctgtccatcggccctgcctgtcccacctggcttctgtggcctgtctcacctgtcacctgttcaacttaccccacgtgtgtcacgtttccccatcccatctgtcacctgccccttttgtcccctgtcccgcctgtcatgtatctcccgtcccacctgtgtcgtgtgccccgcccgtcccatctgccctgcctgttgatgggccgtgccctggtaagcgttgccgtggtaacagccgccccaccctggctgcaggccccaggtgctggtgatgctgaacctggacgcggagcaggccgtgaagcacccccgcctgctgtccttcacgtcgcagctgaaggccggcaagggcctgaccatcgtgggctcggtgctggaggggacgtacctggacaagcacatggaggctcagcgggccgaggaggtgggccgggcggggtctgggggccaggcctctttcccaccccagctgcacaggaaacgtgccctggcatgtcctcatcgcagcgtgtcaacacggtgctgtgcgtggcgctgctgtgttttagccgtggcggtggctttgagctcagagcagcgcgctaaggcctgggagcaccagccgcaccccgggaagcttgggaggtgtgagggccattagctttccaagggcgaaccctgggaccgcctcctcccgccatgggtgagccccgtccagagccgtaatcatggttctgctgcaagctcagtctcccgctgttcaggctcactgggggctgcataagtgtgatgcccgtgtgctgggggctcactgggggctgcataagtgtgatgcccgtgtgctgggggctcactgggggctgcataagtgtgatgcccgtgtgctgggggctcactgggggctcactgggggctgcataagtgtgatgcccgtgtgctgggggctcactgggggctgcataagtgtgatgcccgtgtgctgggggctcactgggggctcactgggggctgcataagtgtgatgcccgtgtgctgggggctcactgggggctgcataagtgtgatgcccgtgtgctgggggctcactgggggctgcataagtgtgatgcccgtgtgctgggggctcactgggggctcactgggggctgcataagtgtgatgcccgtgtgctgggggctcactgggggctgcataagtgtgatgcccgtgtgctgggggctcactgggggctcactgggggctgcataagtgtgataccgtgtgctgggggctcactgggggctgcataagtgtgatgcccgtgtgctgggggctcactgggggctcactgggggctgcataagtgtgataccgtgtgctgggggctcactgggggctgcataagtgtgatgccagtgtgctgggggctcactgggggctcactgggggctgcataagtgtgatgcccgtgtgctgggggctcactgggggctcactgggggctgcataagtgtgatgccgtgtgctgggggctcactggggctgcataagtgtgatgcccgtgtgctgggggctcactgggggctcactgggggctgcataagtgtgatgcccgtgtgctgggggctcactgggggctcactgggggctgcataagtgtgatgcccgtgtgctgggggctcactgggggctgcataagtgtgatgccgtgtgctgggggctcactgggggctgcataagtgtgatgccagtgtgctgggggctcactgggggctcactgggggctgcataagtgtgatgcccgtgtgctgggggctcactggggctgcataagtgtgatgcccgtgtgctgggggctcactgggggctcactgggggctgcataagtgtgatgcccgtgtgctgggggctcactgggggctgcataagtgtgatgccgtgtgctgggggctcactgggggctcactgggggctgcataagtgtgatgcccgtgtgctgggggctcactgggggctgcataagtgtgatgcccgtgtgctgggggctcactgggggctcactgggggctgcataagtgtgataccgtgtgctgggggctcactggggctgcataagtgtgatgcccgtgtgctgggggctcactgggggctgcataagtgtgatgcccgtgtgctgggggctcactgggggctgcataagtgtgatgcccgtgtgctgggggctcactgggggctgcataagtgtgatgcccgtgtgctgggggctcactgggggctgcataagtgtgatgccgtgtgctgggggctcactggggctgcataagtgtgatgccgtgtgctgggggctcactgggggctgcataagtgtgatgcccgtgtgctgggggctcactggggctgcataagtgtgatgcccgtgtgctgggggctcactgggggctgcataagtgtgatgcccgtgtgctgggggctcactgggggctgcataagtgtgatgcccgtgtgctgggggctcactgggggctgcataagtgtgatgccgtgtgctgggggctcactggggctgcataagtgtgatgccgtgtgctgggggctcactgggggctgcataagtgtgatgcccgtgtgctgggggctcactggggctgcataagtgtgatgcccgtgtgctgggggctcactgggggctgcataagtgtgatgccgtgtgctgggggctcactgggggctgcataagtgtgatgccgtgtgctgggggctcactgggggctgcataagtgtgataccgtgtgctgggggctcactgggggctcactgggggctgcataagtgtgataccgtgtgctgggggctcactgggggctgcataagtgtgatgccgtgtgctgggggctcactggggctgcataagtgtgatgcccgtgtgctgggggctcactgggggctgcataagtgtgatgccgtgtgctgggggctcactggggctgcataagtgtgatgccgtgtgctgggggctcactggggctgcataagtgtgatgcccgtgtgctgggggctcactggggctgcataagtgtgatgcccgtgtgctgggggctcactgggggctgcataagtgtgatacccgtgtgctgggggctcactgggggctgcataagtgtgatacccgtgtgctgggggctcactgggggctgcataagtgtgatgcccgtgtgctgggggctcactgggggctgcataagtgtgataccgtgtgctgggggctcactgggggctgcataagtgtgatgccgtgtgctgggggctcactgggggctcactgggggctgcataagtgtgatgcccgtgtgctgggggctcactgggggctgcataagtgtgatgccgtgtgctgggggctcactggggctgcataagtgtgatgccgtgtgctgggggctcactggggctgcataagtgtgatgcccgtgtgctgggggctcactgggggctgcataagtgtgatgcccgtgtgctgggggctcactgggggctgcataagtgtgatgccgtgtgctgggggctcactgggggctcactgggggctgcataagtgtgatgcccgtgtgctgggggctcactggggctgcataagtgtgatgcccgtgtgctgggggctcactggggctgcataagtgtgatgcccgtgtgctgggggctcactggggctgcataagtgtgatgccgtgtgctgggggctcactgggggctgcataagtgtgatgcccgtgtgctgggggctcactggggctgcataagtgtgatgccgtgtgctgggggctcactgggggctgcataagtgtgatgcccgtgtgctgggggctcactgggggctgcataagtgtgatgcccgtgtgctgggggctcactgggggctcactgggggctgcataagtgtgatgcccgtgtgctgggggctcactgggggctgcataagtgtgatgcccgtgtgctgggggctcactgggggctgcataagtgtgatgcccgtgtgctgggggctcactgggggctcactgggggctgcataagtgtgatgcccgtgtgctgggggctcactgggggctgcgttaagtgtgatgccgtgtgctgctgaatttctgcccactcagagctttgtggggagggacgggtgagtgccccgggcgtgtagcatgctggtgccagctctgagccctgctgctgcagtcggctgccccaggacatcggggtctgagactttgtgtcttcatttctctgattttcaaacttcttatgggaagcttcacactatccagaaacggaatgatgacacgatgaaagcctgtggggtcccatcacgtcacgtcacgtcacgtcacctggagttacttctgtatttcttgctaaagcagggagcttttgagtgcccacctgcgtgattttcatgccaagggcacctcattcccaggcagggctggctgccgtgggcgcctcgagcctcctccttccccctcatgtgtgtgggagtctgtggggcctataccacgtgcctgttgcagtggtgtgtgtccgaggtccctcccatgcgggtgccccctctgtccttgctgtgggttgggagccagctccctgctgccaggcccccactgggaccttgtgggtgtgtccaggcatctgcagccgccccccaccgcctccccggtccgtttctctgcacaaccacagccgcactgaggcccgtccaggtctgggccggtcagcctaggggtgggaaccctgctcaagagggctgtgggcacgtggatggtagcagcctcaggtggtgtggcctagggccaggatcccatggaggtaaaaaatggcccccgccgctcccgccacgttggccacgtggatggccaccttctcaggctgttgcacaggttcgccttcccagggaagacaggagatgctctgggccttccctttccctgacggcggcgtcatggctcaccacgggttcaggcgttagctgctattgactgtgaacccgtggatttaggtatcgtggttttcggggggatgttcacggtcctggtccccatatgtccctttccgtgttccttatcccatgctggaatgctcttaggaggaatcccggagttggaactgccctgctggcgtggattctaagaatcctggcactgcctggcctccctggaggtgtgtgagggcgcgtctgtgcgcacgagggacagggcagggattgcagtgactgggggatgacgggaccccctgccacgctctgccacagtcttcacggccatgggaagagctgcgctcacttatactctcacgttaacggagctcacaggcagatcctctccgtccgacagcccttcggctggggggtctggggcagcctcagacaggagcccgctcttgcggacgggaggacgagcgcaccctgcccccgctgctctcagcgagcctttggctgtgacttagctgcattggttgcgagggctggagccagccgcaggccccgccttcccttggctgcctttggggctgcactgccctggggagccgtattctcctccatcgtggctatgttagtgtgaaattagagaaatctgggcaaatcttttttatttatttgttttttaatttttatttattttttgagacagagtctccctctgttgcccaggctgcagtgcagtggcgccgtctcagctcactgcaacctccacctcccgagttgaagcagttctcctgcctcagcctcccagtagctgggattacaggtgcccaccaccacgcccggctcatttttgtatttttagtagagacggggtttcgccacattggccagtctggtctcgaactcctgagctcaagtgattcgtctgcttcggcctcccaaagtgctgggattacaggtgtgagccacggcagcctgtctgggcaaggctgtaaagcatggacatttctctaagaagcgtgcagcttcgtgactcatgcagtcgccagggaggctcatgcgcgcccttgtgctctgttctgtgtggcactgattggcataaaaggggtcctaaggccctggtgttcttgctccccgctcgtaaagttgtcctccgggttgaggtctgtctgcacggaggcctctgcgactgctgcgccgggcaggtgcggggacttgtgataacagggtccccgacacggtgctgacttgtgataacagggtccccgacacggtgctgacttgtgataacagggtccccgacacggtgctgacttgtgataacagggtctccccacacagtgttgagttcctgccaggccagggcagtgccgcgtcctcctgaaaccctgcagtcctgcaaggtggttttcccaacagtgaggccagaagagagttgagatccccagctccgactcctcggagccagcacgtgggggtgagcacagcagccagtcatgtaggaagtggccccgtgacgtggctccagcacttggaggccctcagggcccctccagtggctgcatccaaacttggctgatcctgaacagccgtttccctgggctccgttctccggccagatcggggcacaagaacagagaacctgaattgccctgcagaggggtctcgtggggatgagaagcagccgcataaaggggctgctgtgtggcctttgctgaaatagccacacttcctgccttcttcccacatgacgcccgatgcgggtgcttccctgtgccttcctgcccagagacggctgtgtccaccccgcagcgtccgcctccagccggtctctgcctctctggggcccctgcctccgcttgctggctggtgccccttgggggtaacgtgttcaggcctttcctgacctaaacaaaagtctcaaagaggagcatatctgctggccctgcaccctgtcccgtcttgcgcccgggcagctgggcagaaggtggaggtgtctggagagcagggtaaggacgaggggtgcctgaggaggagtggggccgtgggagaacattggatgttgttttgtgtgtgaagggctggtggagctctaggtgtgagccagggtagggggtgaggataccagtcaggctgacgtaggggctgctggaatctcggcaaaggaggcaggtggtggctctgatccctgagtggcccggggctgctgtgatgggacacagaccacacggctcacagcaaagggcgtctgttctctcctagttctggagcccaggagtctgagatgaaggagaccgcaggccacgctgcctccagagtctcccgggaggatcctcctgcctcctccagctcctgggcccccgggcgaccctgggcgcctgtgcctccacgcagtctcttcctcccagtctgagagctcttcctgccttcatcctgtaaggtcacttgtcagtggcttcagggcccacctctgacccaggatgctctctcaacatcataacctaattacagggttcttcaatacatccataaagacaggttttccaaataaggttgcattctcaggttcctggggctgggatgcgggtatcctcttttttgggggcactattcaacccactgcaattgagctctcggccctaaaattcatatctgccacacatgtacagtatgttcaccccatctcagtgtctcctgaagtctcaggcctgcacagaccagctctgagtcccaactctcatgtaaatctcattgctcggagctcccaaatctcatcctctaagcatccaaaccagaagccagtgaaatgtggggtctggtccatcctggacaaaactgctgtgtctgtagatgtgcaagtgaggaggtggttatcccagaacgcagcaggggacaagccaggagaggcatgtttgctccaaaagggagaatcaggtgggaaggggccactggtaccacacaaggctgagacccagcagggcaggccctggggttccagggcctgaaggtcagagggtgggaggcctgcgtccacacatgcatggctttagtgcgtggcaggtcctcggccacgcacgtgcaaaccccatggagtcaagccgttccgtggtgcagcctcatcagacacccctgggaagagactgcacacagcagtgaccccctccaaccccgggaggagaccacacggcagtcccccacccccgccccccgccgttgctgttagggtgctgcatcctggaccccacggcctccctttgaagagctgctaatttggcccattttcgggtgtttctgatgcaccaggtggatgaacctggcccagagcgtccgagtgaactgggggtgggtctgggatgttgtggatcgcctcagagaactgcctggcgttgtgtccccagagcagccctccacatcccctgcacgtggcatcagtcacacctgctctgtgtctctctccccagtgtgtgagcacgcacatacacacatacacacacagcggccgggagcaccgcagcacaccgttgagccttcgggccttccctcctgctgggtccacaggggaggtggtgcgggtgccctggccaccgtgggtggtgggcgtgggtctgtgcaccccattcctgctgtagcaccaacctgtcctgtctcccgcagaacatacggtccctaatgagcacagagaagaccaagggcttctgccagctggtggtctcgtccagcctgcgggatggcatgtcccacctgatccagtcggccggcctgggcggcctgaagcacaacacggtgctcatggcctggcccgcatcctggaagcaggaggacaaccccttctcctggaagaactttgtgggtaggcatggctggcggcccttcggcatcccctcaccgtcccctctgtgtcctctcagtgtcccctcgctgtcccctgtgtgtctcctcagtgtcccctcgctgtcctctcactgtccccttttcgtccccactgtccccttggtgtcccctctgcatcccctcgccgtcccctcactgtcccctgtgtgtctcctcagtgtccccttgctgtcccctcactgtccccctctgcctcccctcgctgtcccctcactgtcccgtgtcccctcagtctcctctgcatccctttgccatcccctcgctgtcccctaaccgtcccctcaccatctcttcgccgtcccctcactgtcccctcaccatctcctcgccgtcccctcgcggtcccctcaccatctcctcgccgtcccctcgctgtcccctcgccgtctcctcgccgtcgcttcgccgtcccctcgccgttccctcactgtcccctcgccgtctcctcgctgtcccctcaccgtccccttgctgtcccttcaccgtctcctcgccgtcccctcgctgtcccttcaccgtctcctcgctgtcccctcaccgtcccctcactgtcccttcaccgtctcctcgctatcccttcactgtctcctcgccgtcccctctgtctcctcgctgtcccctcaacgtccccaggcctgtgcgctgtcaggtcccgatgggccttgaggccaccgacccgagggtgtgtgctctgaggctgtcgaaggccctggccctgggagcggccatctgaaagtgtccaggcactccctccccttctcccagagccccgcaggggctgggggattccctggacacatgaccagcagctgaactctgctgtgagtctctggctggtccttggaggagctgacggagtgagggtgggggctttgtggggacccccctcgcctcgccgtgcccgcccctgcactggctgtgagtccccggggaggccccttccgcaccctggcctcagatgacctgcggacggccgcctctctccgcagacaccgtccgcgacaccaccgccgcgcaccaggctctgctggtggccaagaacgtcgactcgtttccgcaaaaccaggagcgcttcggcgggggccacatcgacgtgtggtggatcgtgcacgacggcggcatgctcatgctgctgcccttcctgctgcgccagcacaaggtggggcgtgcgacggggacacgccagccggagcacggccaccccacgtgctgcgggccgggacgggctcctctgaggccccacagccatgccctccctgtctgcaggtgtggaggaagtgccggatgcgtatcttcaccgtggcccaggtggacgacaacagcatccagatgaagaaggacctgcagatgttcttgtaccacttgcgcatcagcgccgaggtggaggtggtggagatggtgagtcccgagggcttgaggggaggaggccggggggaggtggggaggaggtggggggcggcccgggagggctgtgggcctcgtgaggtgggggtggagggggaagtggagatcgggagggctgtggcctcgtgaggtgggggtggagggggaagtggagatcgggagggctgtggcctcgtgaggtgggggtggagggggagatcaggaggtggaggtggaggtggggaggagaaggtggtggcgattgtggcgggggctgccaggccttgcggggtggtcaaggaggcttggttttggaatcgccaggacatcacagaaagcacagagccccgtgtgttgcttgtggacacctcgtgtaacacgggtgtgggtgttgccctagagccggcatcagcatctccgtgtcctccatggtcccgtgtcctcctcggcccgggaccccgtccaggacctcacacctcagtggtgttgccatggtgggtgcacctctgagcacctcccgttttgggtgctctccccagatgggctcaccttcccacggctggaaaccacacatcagcagtcgggacccggggagaggggcactggtcagtgaggccaggctgcagctgtcacgtgggacagacaggccctcggtcagctataggcagggcctggacagagactcgtcccgtccttcacgcctggagaggacggggttgatgggcggaggcctggcattggagcgcttgcccccggcccccaagcatggagctctggatcctggggatctggtgggccccttgtgctggatggaaccatgcctgctcgctaccagcccacccggatccacggctgtgccttcccctccggtcctgctggcggtcccgggactttgtgggttctgaccccacttggatcacgccgacaacactggtcttgaagtcagaacccgcaaagtcctggtttcttccggctcccgtgaccccagcgcatggttttgcaggtcctcaggggcctggactcctggaggtgggtgctgggaagacataaagctggatagagactgtcacgctgtcccccaggaagccacctgtgcccctgcagcagcctgggaggtgcggtctctccagccccgcagccccccagtcccccagtccctcagtcccccagccccccagccccccagccctgggtatggcagaggccccgagcacctgctcctggtttgtgtcgggctgtgagtgaggccaggcacggcttcgtgcctcaccgacaaccttctgtgtttctgtgtcagttcccgtggaactcagttgtcctgtggggttgttcttcctcttgccctgcaggacctttcctaggccgagggctgcaggcctgcgtgacgctggatggttttctgcccagttttgtacactgggcttagtttccatgtggctgtgtcttcggggacgatggctggagtttgtcttgtttggacgaggctttgcgggttcaaggttgtaggggttattattggtgctaatagtcgtatgaataacgttatttccaagtcataaaaccgcttagtaaaatagtaacaaaatgctgcctgggagaaccagccctgccagggggccaggtggggcggccactggggcccagaggaaacaggcaaagtgagcccatggccccagccgcacccccagcccctccgtggtgccagaagcagctccccagctcctgagcaggggttgttagctctgaagtccgggaacctggagctcccagcaccccccatgctcccagccatgtctctggcagggctggggctgcccacccctccgtagccctggccgcagggacaagtgccacctggctggagaggggcgtctgggtcgctgccattcagtctggcatgctgtttatttttttaaaaaaagttttgagacagagtctcgctctgtccccaaggctggaacctccacctcctgggttcaggcaattctcctgcctcagcctcctgagtagctgggactacaggtacacgtcaccatacctggctaatttttttttttttctttgtatttttagtagcaatggggtttcaccatgatggccaggctggtctcgaacttctgacctcaggtgatccacccgcctcggcctcccaaagtgttgggatgacaggtgtgagccaccgcacctgatctggtgtgctgttttaaatactggtgcttaacaggcacagctgctcccaactcccatgagccgggtgcggcgggtgagacacagggatcccgcacggcgggtgcggtgggtgagacgcaggggtcccgcatggcggatgcggcaggtgcggcgggtgcggcgggtgagactcagggatcccgcacggcgggtgcggcgggtgagactcagggatcccgcacggcgggtgcggtgggtgagacgcaggggtcccgcatggcggatgcggcaggtacggcgggtgcggcgggtgagactcagggatcccgcacggcgggtgcggcgggtgagactcagggatcccgcacggcgggtgcggcgggtgagactcagggatcctgcacggcaggtgcggtgggtgagacgcaggggttccgcatggcggatgcggcaggtacggcgggtgcggtgggtgagacgcagggatcccgcacggcgggtgcggtgggtgagacgcaggggtcccgcacggcgggtgcggcgggtgagacgcaggggtcccgcacggcgggtgcggtgggtgagacgcaggggttccgcatggcggatgcggcaggtgcggcgggtgcggcgggtgagactcagggatcccgcacggcgggtgcggcgggtgagactcagggatcctgcacggcaggtgcagtgggtgagacgcagcagtcccacactgtggatgttccgggtgaggcgcaggggtcccgcacggtgggtgcaatgggtgagacccagggtcctgcatggcgggcgctgaggttgtgctgtggcttctccatgtgttctgggtgggtttcccatggtgccaagcccccctgagcatagacaatgacacctgtgagcgtggatcatgcagccccatggggcagtgcctcgccctgagccgtgtgtgccaggttggtttgtggctgtggccttgccctcacagctgcccttgtgcccggtcggagggtcccggggagggacatgagcagagcgtgtgtgcggcgtgactgcccatcgtgcgctcacaccttcctggccactgggcggggggcctgagagccagagggggcctgtggggcccgggacgcgtggcctttcccaccgctcagggcggctcggtctctgggtaccgggctggtgttggagccatccgtggttctgtgcacaccgggcttactacgtgcttgggaactttctaggttgaaaacgacatatctgctttcacctacgagaggacactaatgatggagcagaggtcgcagatgctgaagcagatgcagctgtccaagaacgagcaggagcgagaggtacgtgggggccgtggccacagacaccaggctttctgagaagtatagccgacttcgccgagtcttttctgggaccctcctgcagcccacgagggtcctccagagagcatgcctcaggtactgcgtcgcaggctcagcccccagcctgcgtggaggtggcagaggccctgcaggagcacaggagtggcgtcaaagccagagctcatcggagcctgggcgtgcgggtgcctggttagaggaacggcagcctgccagatgcatgctcatgtgcaggaagggacgagggccgagacctttgaacttagcttttctaaccgagcagcgtgcaggcaggagacatggggaccctccccaagggcagtgccctctgacagggtcagcggcttctgagccggatgagtgcccacagctgcttacgatggctgctttgtctcacagcctgaaaccgtggagcccctcagtgcccttccccgcagcatgcacagatttctgtcctaagaccaagtgggaggggagagtgagtgtgcagggagggagggaagcgagctggaggggagttgccaacccccccaccccccaccccccgacacagacctgtgcagcctccgtgcgtggaagctggccgcctggctgcagcggctttggctccgtgggtaactgtaggctgctgaggacgtctgggtgtatccacctgagttatactggcctgggccccatggccactgtgagaccccaagggcaggtgtctttgtggtcacttcgcactggaggacagcacgggggtcacctggtagcgggatgctcagctctgtgaggtcacggcctcatggggtcttcgtgggtcccaccaggctggtatcacacacgtgtgtctgcagaccaggtgcaggtgttggttttctgagactgcagtgacggcggaggcaggggcaggggatttgcctgccctggggccttggcctcagcaggaacctgcagtacacgggtctgcgtgtggggccatatgtgctgacagccggaatcactaagcagcgactgctgctctcccccaacagagaaaggcgtgtggagctgcggtcctgtccactcccagaccccgggcaggtcagggtgggcacagatgcaggacacggggggccgcccagcttgtccgtggacagagaccccttccacgggggtccgggcagccgggagtgtctgggaggacccacatcctctgttttctgtccaggccaggtccctgagatccggcagggtcgccctggcgtcacaagggttcagcccgggtccagctaggaacaagaatccacccatggcttcatgggaagttcagtgtggagagtcagcaaatgctgaccgaggagggaccgggagcgggaacagcaagctcgagctcgaagggcccctcctgggccaggtgggggttggaggtgtcaccgctctgcagaagggtttggatgagctgctgtgcagacgctgggtggacaccctctagtgacttacacggtggccctcgggccaggtgggcggcgctggctctgccgagagcgggcagcccttgggctctggtttcacgttcaaggccatgggaaatttaggctgggccgggcgccacaatgagtagaggcctggggcccactgtctgtgtccagagagggaggcagccccaggccctcccccatctgtgccaatctcttccctttcgggaaggaccgacatccaagttaaacagttttatccagggaagaagaacctggtccagtgaaatcactctggacctttggctttttaaaatcaccccggggctcacaaactcctgatgcccctgggacgagtggctccccgggctgcgtcacaaactcaggcggggctccagccacagtgggagaggtggccattccagtgtgtgcataaataccacttccaaggtggcacccgtgtctgggagctcccattggcctacctgtcaggctggccacgacagcatggagggcgtgaagggtgcagggaggaatgagaacccagtggagggtgtttaaccaccaggggctgcgccattggtgcgatctcgcggtgagggcgccacttccccttcggcgcctacagctaggggcgtggacggtgttttcattttcctcggattgtcagaagtgacgcacagggggccggccctgtcattggccccagcggtgccccacagggcccctgccagcctggccggcccccaaacgtcccctggctggtcagacacagcctgcttccccggggacagggcctggatgctggtacggccccacctgccccaagcctccctgagacggggacgcctgcgtgctggtcgtgtgggcgagcaggtggtctggggtgaacacgtgtgtggagccccgtcaggtgagggggagactctgccagcacgtgtcacctcctgtcagtacggggtcatggggcctttccagttcagggccagggcgggaaggtgagggggtgagcgtttggtcgggaagcctgggaggagggaggcagtcacgggggcggcgcaggaccagtgtgggacgccaggctgggtcccgggtcaggcacacagggcccttcaggttctgtgagctgccctcacctccggcctggcatcccgggtcgctctcgcccagaggagttttgagaccggctggtctcaccaagtcccgggcccgccaggcccagctgatccacgacaggaacaccgcgtcccacaccgcggcggcagccaggacccaagcgccgcctacgccagacaaggtgcagatgacctggaccagggagaagctgatcgctgagaagtacaggagcagagacaccagcctatctggtttcaaagacctcttcagcatgaagccgtgagtgtccgtgcgtgtggcctggggggaacagatcctggcagtgctggcccggcagtgaggacagagtcccttccctgaccactgaagagcttcggggcaaccctgcaggccagtgggcccgttagagaacagggagccgcctgagtgggcactgaggggtccttttggtgccaaggccgggccctgagttcagccctgtggccgggcgctgagggatccttctagtgccaaggccgggagtccttgtaagacctgggtgccaagtgctgaggggtccttctagtgccaagcgctgaggggtccttctagtgccaagcgctgaggggtccttgtaggacctagggtgggtcctgatgttaaccccacagctgggtgacgagcagtcctcctggtacctgggccagccctgaagtcagccctgcggccaggcctgctttactcaggcaagcctcactgcagcaggcagatgggtctgttccatggaggcgaggaggcttgtgccgctgggcacagaattcctggccttcaccctgtgggtagttcaggctgctgtcgggccttagggcctgccctacgccaaggctcccacctgtggccttgggctgcgaacaccagggctgtacagggtccttgcgggtgtgggtttggttctgcagacgcagcctctgagttccagatgagagcgcaagagacacctctcacccggggtcagagccagaccctaaagccaggttctcaggaagggctgggggctcctgggccctgtggggtgggatgaggcggcgtcctcctgggcagccatgcgatctggaacagcctggtgctctctcctgaagtcagtaacacactcttgtttttttctcctgcatagagaatggggaaacctgtaagtccactcgctacaaccaggtcgccttccgggcccggttgccctgcatgcctgtgtgtgtgtggcctgcgtgtgtctgtgcgcgtgttctaggcctgtgcctgccccgtgcacggtggcttgtgtgcgtccgcgtacagccagagctcacccagagctgctgcggctcccacgtcagtttcctgttgccttcgctcccctctgttcacggtggctccagcacacgcctgaagcctcttcctaagtgaggcccaggaactgagacctgggaggtgtccgagccgctccggagtggaggggaggcgtgcgcctcgcagggcccgtcagtgagtccatccacgtccttctgggtcaggcgctagctgagtcgcgttcccacctggaatgccttccatgttaaagctgtccagcctccaggcggagaggggtgcagatcagttctctgtgtggtcggaccctcggcaggagctacctgcgtctgagctccggggcaggtgggagggtgtaccctggacggacccccagggtgctccctgggagtcctcgatgccgtctctgtcccctgcctgcccccgccagtaaccgcctgggccatgttttccttgtgggcaggcagtgcctggtgcctgagtgaggaacgccttggctgagtggccacacttcccttccctttttatctttaaccccgaaacctgaattaatcagactcaagaaactgtgcagctatgtgcgaggcgtgcagggaatccctgtacttcctgctccgttctgtaaatctgaaagtgccttcagaatagcgtgttaattaaagccgaagaacgacgtagacccaggagtagggtttgacacacacatgcacaggcacacacactcggggaccctcagtggcacctgtgcctcctcccagcgccggggcttgcctccccttggtcggggcgggggcaggtccccacaggcctgtagggtcaggagaaggtgggccagaatggacaacgcgtgggctttgtattcatgtgtggcgtgcgtctgggatggcattgactctcttggcccagcagtttctcggggttgggctgggagaagccctccgaagatctggaggtcggccctgacctcttctgggcagtgcgggcgtgagatgtgcgtggcttactgtgacgtccccgggagcacacttaacggatgtctgtttgtgtgcgtgctcgcatgtacctgtcagcgcacctgccggtggacgtgtacctgcctgtgtgcacgtccacgtacgttagtgtgcatgtctgtgtgcacatactatgcatgtcttacatgttagtgtgtctgcacgcatttgcacattgtgactgcatgcctgtttgtacatgatagtgtatgcacttgtgtattagtgtgactatgcctgtgtgtgtacacatcagtgtgtctgcatgtatgtgtgtgtgcgtatacacattagtgtgcgtgtctgtgcctgtgtctgcactggtcctccttgctgtggcggccggcatactccaccagtagccaagggccaggtctccgcctcaccccagcactcactggctgtggacacgctgcccactccgacccccctgtgctcctggcctgctttcacttcctggagctgctctttgtccccaaacacactggtaattgtggtctatccagaagtcgaattcaaagttccaagttcctggcacgaaagccccttgactgtgctgtggacagagaccccatctgtaattagaccaggctggagagaagatagaaggtctctccctgtgttcctcctggaaattggtggttatgatcacgtttatgtggcttaagcgtcaagcggatcaaagggcgtgagcctggatagcgtccgtggggcctctccatgaccctgcatgggcggcctctgtctgtccgccgccgcccctctgcgtccagggcgctggtgacctcccccagggggccacagtcacgaccgcacggctgcagctggcctgagacccgctccgactttcaagtccacacacgggccgggtttttccaacacagaaacgcaagtgctcccctccgcccagcgtttccccaggtggcctcctggaacgccagttctgctgcagtttaggggcctgcctaggaggggaccgtggggtagaggagggagataagctctgtcccgcaagggcctgagcacctcacagcatgattctgcagtgtccccaaacctacttggttggggagcctcctgtggggctgtggccgggcccaggccgccagggacgctttgagacatggaccggccacagcagcttcagagagcagacagggagggtcgtggagcagagctgcgttgtgaggacggaaggcgggggctggacggccacacggtggaagtgcttgtcctttagcccttggccagacaggggcagggtgggccgtaggaggggacccagtagtggccactgagggcctgtgcctccagctgagtcctcggcataccctgtccttgtcaggcctgggagcttcagcagcaacggctgcacaggccggtgtgggggactctgggcctttccttcctgagcttccggccccttggacccagttgtatcaggaccctcggagaggaggccatgtgtgcccagcctgacgggtctgtgtttggcagtgtctgacgtggggtttaggggcgatgatgtagatgtcaagagaagcgtgtcagccttgaaggcgtcaggcacatgggccacccagacggcttccactgttctgcctgctttgcagatgtagatgtagttaggaaagcgcttgcggtttgtgttgtgtgactgtagcccttagaagcttggcagccttagtgggctgagttctaggtccctggaggccaaagcatcccgctgctgaacgcccgccctggctgcagtcagcgcctttcgctcggagccgccacttctgcatccttcagggtcagagaatccgcctgatcctgactcacacagccctttccaacacgtgtgaatgcagctcatcagggctcagctcagcctcgtgtccggagcgtggggtgcacccgccgcccgctgaccgtgcccacctcccctgcagggaccagtccaacgtcaggcggatgcacacggctgtgaagctcaatggcgtcgtcctcaacaagtcccaggatgcgcagctggtcctgctcaacatgccaggtcctcccaaaaaccggcagggagacgagaactgtatcctttcttgcagtgtgcctgctgagcgtgcgggcaccccctggtggcttctcgctaagacctgggtttgtgggtgctgggagtgaggctggcttcccgcctctccttcagccccaggctctgggagctacgaccgggatgcagtggggctctgagcccagtggtgaccgggccagagttggggccagccctggcattggtgtgggggagggagggcccgcctacagtaccagccccactgtccccaggtgctcagggctgccctggggctgggaggctccctgtcatgcatccccacagcagctgtgcattctgggacctccgctggggctcagccccaccctgcgccgacaacggtgggaggtgaggagcccagctctcggctttaaggccacaattggtcgcagctttgggaatttgtgctttggaaggagaactccgcagtgcatctgggcgtattggcacagacagggtgacgcctggcacatccctgccaggttggcaccaagaactggggccagtgagggcatgtcctccatgcgtcctgatcggaatccgtggcccaggtcccctgtaggctggtgaggacccagtcccgtggctggggttccctgtcgggtggggtcagcaccgtgggctgtgtcgctgtctctgctcgtcctccctgtggccacggtgctccctctctttcccgagcactggcccctctctcccctgccctgctcctccccgcctggggggtctctctaatccccacctctcttttcaccttggctctgggtttctcaaaccaaatcttagctaaccaggagaggataaacctcactcctatcacgatttcagctacacacgctcaggtaagatcagctgtggccttaactctgttgaccacagacatggagtttcttgaagtcctgaccgaggggctgaacagagtcctcctggtcaggggtggcggccgggaggtgatcaccatctactcctaatgcccaacagcatcacggcactctgggacaggcacggaggacggcgtgggcagcctgggcctgggcttggcccagggaaacagacggcagacacacctgtcccccagtgatgccgcccaagctgcccatggggcttcctacggaagtttctaggcccgtcacctagggctctcc

SEQ ID NO: 14063 - DNA, 3142 bp, Homo sapiens
ggagcacgaggaggacgaggagagccggcggcgggaggccaaggctccgcgcatgggcaccttcatcggcgtctacctgccgtgcctgcagaacatcctgggcgtcatcctcttcctgcgcctgacgtggatcgtgggggtggctggtgtcctggagtccttcctcatcgtggccatgtgctgcacatgtacaatgctgaccgccatttccatgagtgcgatcgctaccaacggtgtggtcccagctggcgggtcctactacatgatatcgcgctcgctgggacccgagtttggaggcgctgtcggcctctgcttctacctgggcacgacgtttgcaggggccatgtatattttggggaccatcgagatttttctgacgtacatctccccgggtgcggccatcttccaggcggaggctgcaggtggcgaggcggccgccatgctgcacaacatgcgtgtgtacggcacgtgcacgctcgtgctcatggccctggtggtcttcgtgggcgtcaagtatgtcaacaagctggcgctggtcttcctggcctgcgtcgtgctgtccatcctggccatctatgccggcgtcatcaagtctgccttcgaccccccggacatcccggtctgcctcctggggaaccgcacgctgtcacggcgcagcttcgatgcctgcgtcaaggcctacggcatccacaacaactcagccacctccgcgctctggggcctcttctgcaacggctcccagcccagcgccgcctgtgacgagtacttcatccagaacaacgtcaccgaaatccagggcatcccgggcgcggccagtggtgtcttcctggagaacctgtggagtacgtacgcgcacgcgggggcgtttgtggagaagaaaggtgtgccctcggtgcccgtggcagaggagagccgtgccagcgcactgccctacgtgctcaccgacatcgcggcctccttcaccctgctggttggcatctacttcccttccgtgaccggtatcatggcgggttcaaaccggtccggggacctcaaggatgcacagaagtccatccccacggggaccatcctggccatagtgacgacgtctttcatctatctctcctgcattgtgctgtttggggcctgcattgaaggcgtggtcttacgagataagttcggggaggccctgcaggggaacctggtcatcggcatgctggcctggccctccccctgggtcatcgtcatcggctccttcttctccacctgcggtgccggcctgcagagcctcacgggggcaccgcgcctactgcaggccattgcccgtgacggcatcgtccccttcctgcaggtgtttggccacgggaaggccaacggggagcccacgtgggcgctgctgctgacagtcctcatctgcgagactggcatcctcatcgcctctctggacagcgtggccccgatcctctccatgttcttcctcatgtgctacctgttcgtgaacctggcctgcgccgtgcagaccctgctacgtacccccaactggcgtccacgcttcaagttctaccactggaccctgtcctttctgggtatgagcctgtgcctggcgctgatgttcatctgctcctggtactacgcgctgtccgccatgctcatcgctggctgcatctacaagtacatcgagtaccgcggggccgagaaggagtggggcgatggcatccgtggcctatccctgaacgccgcccgctacgccctgctgcgcgtggagcacggtcccccccacaccaagaactggaggccccaggtgctggtgatgctgaacctggacgcggagcaggccgtgaagcacccccgcctgctgtccttcacgtcgcagctgaaggccggcaagggcctgaccatcgtgggctcggtgctggaggggacgtacctggacaagcacatggaggctcagcgggccgaggagaacatacggtccctaatgagcacagagaagaccaagggcttctgccagctggtggtctcgtccagcctgcgggatggcatgtcccacctgatccagtcggccggcctgggcggcctgaagcacaacacggtgctcatggcctggcccgcatcctggaagcaggaggacaaccccttctcctggaagaactttgtggacaccgtccgcgacaccaccgccgcgcaccaggctctgctggtggccaagaacgtcgactcgtttccgcaaaaccaggagcgcttcggcgggggccacatcgacgtgtggtggatcgtgcacgacggcggcatgctcatgctgctgcccttcctgctgcgccagcacaaggtgtggaggaagtgccggatgcgtatcttcaccgtggcccaggtggacgacaacagcatccagatgaagaaggacctgcagatgttcttgtaccacttgcgcatcagcgccgaggtggaggtggtggagatggttgaaaacgacatatctgctttcacctacgagaggacactaatgatggagcagaggtcgcagatgctgaagcagatgcagctgtccaagaacgagcaggagcgagaggcccagctgatccacgacaggaacaccgcgtcccacaccgcggcggcagccaggacccaagcgccgcctacgccagacaaggtgcagatgacctggaccagggagaagctgatcgctgagaagtacaggagcagagacaccagcctatctggtttcaaagacctcttcagcatgaagccagaatggggaaacctggaccagtccaacgtcaggcggatgcacacggctgtgaagctcaatggcgtcgtcctcaacaagtcccaggatgcgcagctggtcctgctcaacatgccaggtcctcccaaaaaccggcagggagacgagaactacatggagtttcttgaagtcctgaccgaggggctgaacagagtcctcctggtcaggggtggcggccgggaggtgatcaccatctactcctaatgcccaacagcatcacggcactctgggacaggcacggaggacggcgtgggcagcctgggcctgggcttggcccagggaaacagacggcagacacacctgtcccccagtgatgccgcccaagctgcccatggggcttcctacggaagtttctaggcccgtcacctagggctctcc

SEQ ID NO: 14064 - DNA, 104200 bp, Homo sapiens; identical to SEQ ID NO: 1260

SEQ ID NO: 14065 - DNA, 3234 bp, Homo sapiens
actccgaggcgcgggctgcgggcggcgggcggcgggcgcaccatgccctccttcgacgaggcgctgcagcgggtgggcgagttcgggcgcttccagaggcgcgtgtttttgctgctgtgcctgacgggcgtcaccttcgccttcctcttcgtcggcgtggtcttcctgggcacgcagcccgaccactactggtgccgcgggccaagtgccgcggcgctggccgagcgctgcggctggagcccggaggaggagtggaaccgcacggcgcccgcctcccgcggcccagagccccccgagcgccgcggccgctgccagcgctacctcctggaggcggccaacgacagcgcctccgccactagcgctctcagctgcgcggacccactcgccgccttccccaaccgctcggctccccttgtgccgtgccgcggcggctggcgctacgcccaggcccactccaccatcgtcagcgagtttgaccttgtctgtgtcaatgcgtggatgctggacctcacccaagccatcctgaacctcggcttcctgactggagcattcaccttaggctatgcagcagacaggtatggcaggatcgtcatttacttgctatcctgccttggtgttggcgtcactggggttgtggtggcctttgcaccaaacttccctgtgtttgtgatcttccgcttcctgcaaggtgtatttggaaaggggacgtggatgacttgctacgtgattgtgacagaaatagtaggttcgaaacaaaggaggattgtgggaatcgtgattcaaatgttctttacccttggaatcataattctccctggaattgcctacttcatccccaactggcaaggaatccagttagccatcacgctgcccagctttctcttcctcctttattactgggtggtccctgagtctccccgttggctgattactcggaagaaaggagataaagcattacagatcctgagacgcattgctaagtgcaatgggaaatacctctcatcaaattactcagagatcactgttacagatgaggaagttagtaatccatcctttttagatctggtgagaactccccaaatgaggaaatgcacacttattcttatgtttgcttggttcacaagcgcagtggtgtatcaaggacttgtcatgcgcctgggaattatagggggcaacctctatatagactttttcatctcgggcgtggtggaactgccaggagctctcttgatcttactaaccattgagcgccttggacgacgcctcccctttgcggcaagcaatatagtggcaggggtggcatgccttgtcactgcgttcttaccagaaggaatagcatggttgaggaccacagtggctacattgggaagactagggataaccatggcctttgaaattgtttatttggtaaattcagaattgtacccaacaacattacgaaatttcggagtttcgctctgttcaggtctgtgtgattttgggggaatcatagccccatttctgctctttcggctagcagccgtgtggctagaactacctctgatcatctttggtatcctggcatccatctgtggtggccttgtgatgcttttgcctgaaaccaagggtattgccttgccagagacagtggatgatgtagaaaaacttggcagtccacattcctgtaaatgtggcaggaataagaaaaccccagtttcccgctctcacctttgaggcccccgacaaagacagaaagaaggagctatccaggagctgatcctccttgcaaagctgtgccttgcagagatgcacgtgtgcatttcagctacatcatgccgcgctgttgtaatactgtataaagacctcaatctatccagagtatttttatataatgttggatgagttaggatttgtaatgctgttgaagtttctgggaacacataatatgtagccagtttaacaaagaagctgtcaggtgcacagcccttcctgggtttttttcttgtgttccctgtggtctctgacccattaggctaaagagagacaagagaagcccccaacctgattctcatgacagctccatcaagaatgtgggatgtgccgaccaaggatttgagaaagttgtacagaaatgtgttcatcaaatctggtcaagggactaagctcctagctgaccattcattctgaagattgcatggaggatgaacatctgggaatcctgttaatgagaaggctgaatcacaggcacctgggccaaagggtgtgagcattcatgttctctgctcaccttggtttccgcacaccttcgcaatgtgaacaggtcaggagtccctcccgtccacctcctctgtaacagctggggttccaggcatggtttaggccctgttccagcaataagaaccaatctgctgtacaatctgaggacttggctctgttatttacaaaatgatgctgtggttctgagattatttgggacatttttggctctcctttagtggacacctagagccacagattcccttctttactaaacaaatcccatggattctgatttctgggtcttaggattttaaaagtgaagggatatttttcttatatttgtgagttcagttccgatggtgcccgtggtcaaaagcgaaaaacatggacaattcctattcattcttagcactttgacatgtcttggggaaaagcttacattttaatttaaaagaaagatcaattatatccatgcttaacaggatcagcaggagctttataaatgactttacagagactaataagggatttgatctttctttttttgttatcgaggcttttgaaatgtggaacttgtgtgttctgctttatatgttatattcaatatcttttcagatgcagtctatattttatgctgagttttaaaaatgaaatactttatgcaaacaggcaaaattggtaccaaagggaaacattaaccatgaggaagagcatttttctaaggagaacaggtgacaatatacacatgtgcgctaatcgtaaaatgagcatcttagtctttaaaacacatcagaattgaatacgaataatctatttgtcgatgaaataaacacaactctttgaggatttgagactacattcaccctttattcacagtcacttgcagttttgcttttctctgcatttctctgctgtaagatgactgttgcattgttgaattgtattttgagtggatatttttgtttggtaacaattaaaattttaaatcgtaaaaaa

SEQ ID NO: 14066 - DNA, 3136 bp, Homo sapiens
ggccaggaacgcacgctgcctggccgtatcgccgcccccaccgccgccgccgccgggactagaagtgagccgcccgggtcccaaacgccagccagccagtcagtgggtcccgcagtcgcccgcaaccggggcgaatcatggcggccgccaaggtggctttaaccaagagagcagatccagctgagcttagaacaatatttttgaagtatgcaagcattgagaaaaacggtgaatttttcatgtcccccaatgactttgtcactcgatacttgaacatttttggagaaagccagcctaatccaaagactgtggaacttttaagtggagtggtggatcagaccaaagatggattaatatcttttcaagaatttgttgcctttgaatctgtcctgtgtgcccctgatgctttgtttatggtagcctttcagctgtttgacaaagctggcaaaggagaagtaacttttgaggatgttaagcaagtttttggacagaccacaattcatcaacatattccatttaactgggattcagaatttgtgcaactacattttggaaaagaaagaaaaagacacctgacatatgcggaatttactcagtttttattggaaatacaactggagcacgcaaagcaagcctttgtgcaacgggacaatgctaggactgggagagtcacagccatcgacttccgagacatcatggtcaccatccgcccccatgtcttgactccttttgtagaagaatgtctagtagctgctgctggaggtaccacatcccatcaagttagtttctcctattttaatggatttaattcgctccttaacaacatggaactcattagaaagatctatagcactctggctggcaccaggaaagatgttgaagtgactaaggaggagtttgttctggcagctcagaaatttggtcaggttacacccatggaagttgacatcttgtttcagttagcagatttatatgagccaaggggacgtatgaccttagcagacattgaacggattgctcctctggaagagggaactctgccctttaacttggctgaggcccagaggcagaaggcctcaggtgattcagctcgaccagttcttctacaagttgcagagtcggcctacaggtttggtctgggttctgttgctggagctgttggagccactgctgtgtatcctatcgatcttgtaaaaactcgaatgcagaaccaacgatcaactggctcttttgtgggagaactcatgtataaaaacagctttgactgttttaagaaagtgctacgctatgaaggcttctttggactgtatagaggtctgttgccacagttattgggagttgccccagagaaggccataaaacttacagtgaacgattttgtgagggataaatttatgcacaaagatggttcggtcccacttgcagcagaaattcttgctggaggctgcgctggaggctcccaggtgattttcacaaatcctttagaaatcgtcaagatccgtttgcaagtggcaggagaaatcaccactggtcctcgagtcagtgctctgtctgtcgtgcgggacctggggttttttgggatctacaagggtgccaaagcatgctttctgcgggacattcctttctcggccatctactttccgtgctatgctcatgtgaaggcttcctttgcaaatgaagatgggcaggttagcccaggaagcctgctcttagctggtgccatagctggtatgcctgcagcatctttagtgacccctgctgatgttatcaagacgagattacaggtggctgcccgggctggccaaaccacttacagcggagtgatagactgctttagaaagatactgcgtgaagaaggaccaaaagctctgtggaagggagctggtgctcgtgtatttcgatcctcaccccagtttggtgtaactttgctgacttacgaattgctacagcgatggttctacattgattttggaggagtaaaacccatgggatcagagccagttcctaaatccaggatcaacctgcctgccccgaatcctgatcacgttgggggctacaaactggcagttgctacatttgcagggattgaaaacaaatttggactttacctacctctcttcaagccatcagtatctacctcaaaggctattggtggaggcccataggaagatcagccctgggatagtgctgtctttttgtgggtactgcagtaaagaacatccctcctgggaatgaagcaatgcttcatcccttttacgtccatctcttgtttaaattcaagtccaggcttttttatcatgtgaaatcattcattttctgggtgttttcttaaccagatcattgtgaaattattcataattattatttggccctctgcccagaaacctttgtttgcatctgaaaattgatgggatttggtcaacactaacatgatttggggaaaggagcaagtcagaatagaaattagtactcccctccttgaactaggattgtagtcccaaagaggctactgtaaggcaatcatggtgctcagagcagtgtttcgtgtgtgttttaaactggtaggaaactaggtgcatatttataaaaataaaaaacactgggagaaatgaaaaaatatatatcaaatatattcagcctggcttcaaattgtaagcatgcacaaattctgtctctggattatattatgaagcttttatgtgaaacatgtttctttgtaatgaaaaccacattggagatgtttagtaatcatattgttactggtaccaagactactagggaaatgcctttgtactttagggaagtacttttggcattttactgtacagacagaaaaaactgagatgtagcccctctcctggaagtgctaattttgaaaaactgctcatatgatgtacatgtactgattactgcctattttaataaacactcttgaaaaatgcatgttgccctgttgctgcctgccctattctcctcatctccccatcattggtacccacttgcttttaaaatccactttatcttgaataatgtaagacaaatatgttctgacataagtatttaattcatgttgccttgcataatggtcagaggcgcatgaatttgtgaaggtggaaataaactatttgtaaagtga

SEQ ID NO: 14067 - DNA, 3192 bp, Homo sapiens
aatgggcgggcagcatccacatgacccgcgccggcgggagggcgtggggaggcaggccaggaacgcacgctgcctggccgtatcgccgcccccaccgccgccgccgccgggactagaagtgagccgcccgggtcccaaacgccagccagccagtcagtgggtcccgcagtcgcccgcaaccggggcgaatcatggcggccgccaaggtggctttaaccaagagagcagatccagctgagcttagaacaatatttttgaagtatgcaagcattgagaaaaacggtgaatttttcatgtcccccaatgactttgtcactcgatacttgaacatttttggagaaagccagcctaatccaaagactgtggaacttttaagtggagtggtggatcagaccaaagatggattaatatcttttcaagaatttgttgcctttgaatctgtcctgtgtgcccctgatgctttgtttatggtagcctttcagctgtttgacaaagctggcaaaggagaagtaacttttgaggatgttaagcaagtttttggacagaccacaattcatcaacatattccatttaactgggattcagaatttgtgcaactacattttggaaaagaaagaaaaagacacctgacatatgcggaatttactcagtttttattggaaatacaactggagcacgcaaagcaagcctttgtgcaacgggacaatgctaggactgggagagtcacagccatcgacttccgagacatcatggtcaccatccgcccccatgtcttgactccttttgtagaagaatgtctagtagctgctgctggaggtaccacatcccatcaagttagtttctcctattttaatggatttaattcgctccttaacaacatggaactcattagaaagatctatagcactctggctggcaccaggaaagatgttgaagtgactaaggaggagtttgttctggcagctcagaaatttggtcaggttacacccatggaagttgacatcttgtttcagttagcagatttatatgagccaaggggacgtatgaccttagcagacattgaacggattgctcctctggaagagggaactctgccctttaacttggctgaggcccagaggcagcagaaggcctcaggtgattcagctcgaccagttcttctacaagttgcagagtcggcctacaggtttggtctgggttctgttgctggagctgttggagccactgctgtgtatcctatcgatcttgtaaaaactcgaatgcagaaccaacgatcaactggctcttttgtgggagaactcatgtataaaaacagctttgactgttttaagaaagtgctacgctatgaaggcttctttggactgtatagaggtctgttgccacagttattgggagttgccccagagaaggccataaaacttacagtgaacgattttgtgagggataaatttatgcacaaagatggttcggtcccacttgcagcagaaattcttgctggaggctgcgctggaggctcccaggtgattttcacaaatcctttagaaatcgtcaagatccgtttgcaagtggcaggagaaatcaccactggtcctcgagtcagtgctctgtctgtcgtgcgggacctggggttttttgggatctacaagggtgccaaagcatgctttctgcgggacattcctttctcggccatctactttccgtgctatgctcatgtgaaggcttcctttgcaaatgaagatgggcaggttagcccaggaagcctgctcttagctggtgccatagctggtatgcctgcagcatctttagtgacccctgctgatgttatcaagacgagattacaggtggctgcccgggctggccaaaccacttacagcggagtgatagactgctttagaaagatactgcgtgaagaaggaccaaaagctctgtggaagggagctggtgctcgtgtatttcgatcctcaccccagtttggtgtaactttgctgacttacgaattgctacagcgatggttctacattgattttggaggagtaaaacccatgggatcagagccagttcctaaatccaggatcaacctgcctgccccgaatcctgatcacgttgggggctacaaactggcagttgctacatttgcagggattgaaaacaaatttggactttacctacctctcttcaagccatcagtatctacctcaaaggctattggtggaggcccataggaagatcagccctgggatagtgctgtctttttgtgggtactgcagtaaagaacatccctcctgggaatgaagcaatgcttcatcccttttacgtccatctcttgtttaaattcaagtccaggcttttttatcatgtgaaatcattcattttctgggtgttttcttaaccagatcattgtgaaattattcataattattatttggccctctgcccagaaacctttgtttgcatctgaaaattgatgggatttggtcaacactaacatgatttggggaaaggagcaagtcagaatagaaattagtactcccctccttgaactaggattgtagtcccaaagaggctactgtaaggcaatcatggtgctcagagcagtgtttcgtgtgtgttttaaactggtaggaaactaggtgcatatttataaaaataaaaaacactgggagaaatgaaaaaatatatatcaaatatattcagcctggcttcaaattgtaagcatgcacaaattctgtctctggattatattatgaagcttttatgtgaaacatgtttctttgtaatgaaaaccacattggagatgtttagtaatcatattgttactggtaccaagactactagggaaatgcctttgtactttagggaagtacttttggcattttactgtacagacagaaaaaactgagatgtagcccctctcctggaagtgctaattttgaaaaactgctcatatgatgtacatgtactgattactgcctattttaataaacactcttgaaaaatgcatgttgccctgttgctgcctgccctattctcctcatctccccatcattggtacccacttgcttttaaaatccactttatcttgaataatgtaagacaaatatgttctgacataagtatttaattcatgttgccttgcataatggtcagaggcgcatgaatttgtgaaggtggaaataaactatttgtaaagtg

SEQ ID NO: 14068 - DNA, 568 bp, Homo sapiens
agcatccacatgacccgcgccggcgggagggcgtggggaggcaggccaggaacgcacgctgcctggccgtatcgccgcccccaccgccgccgccgccgggactagaagtgagccgcccgggtcccaaacgccagccagccagtcagtgggtcccgcagtcgcccgcaaccggggcgaatcatggcggccgccaaggtggctttaaccaagagagcagatccagctgagcttagaacaatatttttgaagtatgcaagcattgagaaaaacggtgaatttttcatgtcccccaatgactttgtcactcgatacttgaacatttttggagaaagccagcctaatccaaagactgtggaacttttaagtggagtggtggatcagaccaaagatggaggatgttaagcaagtttttggacagaccacaattcatcaacatattccatttaactgggattcagaatttgtgcaactacattttggaaaagaaagaaaaagacacctgacatatgcggaatttactcagtttttattggaaatacaactggagcacgcaaagcaagcctttgtg

SEQ ID NO: 14069 - DNA, 19512 bp, Homo sapiens
gacgtatgaccttagcagacattgaacggattgctcctctggaagagggaactctgccctttaacttggctgaggcccagaggcaggtgagcaaagaggagcaaacttgcattctggggtttccttagcaggataccccaaccctgttccacttgcagttgcctttgcggcattggtatctgacttaaccatttttctgttttgcaccaaaactctcgataaattttaaaggctgtaaagagaaattgcttagaaatggtgtgataaacaggtatttggcatttgctcatttcttgctaaggtggagtgatttcctaactgcaccagaagcctaatgctccgaaaacatgaaggaggtcttttctcctttcttgaagtctcatgttgagagatgtagcgaaagaatcccgtgttggtgtcactgtgcctgtcggcagctgcacgttgctaaatgaaagccgtctttgctctgtggagcagcccttcatcagcgcatcgtctaactgccatgccttccgtttttctgaatatcaaaatgagataattttgtttagtctggagttacagtttaaaggctttcagacctattttctctgtgaaaggattcataagttatatggaaacaattttaggaatgctaaattttattttatggttaacagaaaccaatctcttgaagttgtgggagtcagaaacttaagacatggaactttctcctttaactcttacccagctttctgtagatcaggattagagaagaaaagccttcatagcatgtgttagtaaaataaatggtgtttgtaaaataaatccactcacaggcgagtgtcgtttttagaaaaatttctccttttaggcagagccatctctgaatcctgtgagacttcgcagtttctggcatggagctctgggtttgtacagagacgccagtgtgaccacaatgggttgctgcaggctacacttttaggactgtcagaccttgagccagggcccccttcttttagctctttcccacccaaatgcagcggtgagttttgtgtgcagcatgcaagtcaaagtagtgggtgtgtgctcagtaaattctaacgagcacctctggaaaaccagctggccttgcttaaaagaggaagccgatttctctgagtgcaggagaaataactataatcacgtgtagaggtggaagcaacactgctctcccttccctttgatttttaacactgcttaggagatgattatctcttcgtctgtatgccaccagctattgtagaaatttggggattaagagaagcagagaagttttttttagatccctcctactcttcagctggcagcggcttcccacaatttttcctttaagctctttgcagcttttgagagtttatgatgggtgcttgttgatactggccatgaaagggttagaccagattgatgagatttatagcaggaaatgattcgctgccgcttagaggtttagagcaattcacaatggccttacctggaataggctttttactgcatgaaccctagtgggcccgacaaattcaagcaagggaggtcgtccacctgtgggcacagcgctgcctgtccagcactgtgcagcacttgtagcatttatcctggacagaggagtgaaggagcagagttttgtctcatttcaagaacatgctacagttctggctttggaaaagttaaataaaagtctaggatttcatttgtcttttaggagaggaattaatggtggtggtaggtccctcctccccccaccctctataattttcagagtattttcactcattattttgatgccagaacatttctaagtattgcatatttatatccctgtaaataaaatattgcttctcttttggatgcatctgtcaaaatgaaggtactattgatttccatctatatagggctacagttggaaacaactcatagaatttgcaaaagaaatgttttgtatcttaaagaggcatatttctatgtaaagctattttcagttaagtgactttgaaggagattccaaatgatctcattgtattagaattgtgttacattgacagcaactaaaattcagtgggttgatagctggggttgctgattattttcattgttcactgattttaattatcatggattctgaaaaacaaattttattgaatgtatgtattcattcaacaggtatttattaagcactgactatatgtcaccctcatttgacaactctctgtgacataaaattactgttttatttatgcagacagagaagtgcagcactctgaaatgttctggcatcaaaaacactgtgaggataataggtcaaaagaaccagaaaacaatgactgactgacctgaagtatgaatttagaaaagatggacaaaaaaagagaaaaagtaacgatcaactgtaatacagccacctagttttagctactgtaaatgttttgagtatctctgggtggtagggaggcaaaatattagtattaattttatatgcatatatatgtaaacctcttacaagcatttttaataaaaagtgacatcattttgtatatagtcttaaaaattgtttttaaaaaaattaccaggaaataggtcaaacatttaaataggtacaaagaatcatatgacaaatacctatctacttaccatgctctttttagcctatgttttcttttataattccttgtgaacatttaatatcaaatattcttttacagtatcattttgaatgatagggttttgttttaaagttattatttttaaaggctatagtcctccgttattggacatttagaatatttcccaaatttttgttctttttgtttaaagagcaaaaatttgggaaataatcgaaatttccaataagtactacaaatgttttttaagtgctacattcttgtagcttgttacatgcatgattatcttctatcctaacttttttctttttgagacggagtttcactcttcttgcccaggctggagtgcagtggcgcgatcttggctcactgcagcctccgcctcccaggttcaagtgattctcctgcctcagcctcccaagtagctgagattacaggcatgcgccaccacgtccggctaattttttatttttagaagagacggggtttctccatggtggtcaggctggtctcgaactcctgacctcaagtgatccacccacctcggcctcccaaagtgctgggattacaggtgtgagccactgcacccagcctattctaacttcagaggttatgtacattttaagggtttgggtgtatattactaaacatctctctatttatgcttgctttaatggcaaatttcagaaggcttgttatcaacttttgccaggctgggtattgccacttaaaacaaaaacaaaaatacatacaaaccaaaaacctgccaatttgattgatgaaaaatgatgtctcattgatgtttttatttgctttatttactttattttattttatttttttgatacagtctcactctgttgcccaggctggagtgcagtggcgcgatctcggctcactgcaagcttcacctcacgggttcacgccattctcctgcctcagcttcccaagtagctgggactacaggcgcctgccaccacacccagctaatttttttcttttttttgtatttttagtagagacggggtttcaccatgttagccaggatggtctcaatctcctgacctcatgatccacccacctcggcctcctgaagtgctgggattacaggcatgagccaccgtacccgacctatttttatttttgagatagagtcttgctctgttgccgaggctgaagtgcagtggcgtgatctcagctcactgcaacctctgccccctgggctcaagtgattctccctcctcagcctgagtagctgagactacaggcacatgccaccatgctggtctaatttttgtgttatattatagagatgggctttcaccatgttatccaggctggtcttgaactcctgtgctcaggtaatccgcccgcctcagcctcccaaagtgctgggattacaggcgtgagccaccgtgcctggcctcagtgatgtttttaactgtgcattttttttaatgagaatttgaaaataggcttataacatcatttttgtcaaaggatggttttgattatattgaaatttggttttaaacattaatagcactaaaatctttttattaataagaacttatgaaatccattcctacttttttccttgacattttagttgtatcatggatttagaacccaatgagtaatgtttaaagttaatgtatggtcatttttgttttatcttcttttctgtcacctgttttcctgctctctgattcctgtgcatgcaaagcagaaggcctcaggtgattcagctcgaccagttcttctacaagttgcagagtcggcctacaggtttggtctgggttctgttgctggaggttagtcatggatgagagaaaaattttcacttttgttattcctattctcttttctctgattttccatcttgaaatgttaaaggacaaagtcttctctagtctttcccaatgccagttatcagtttctacctgtgaggtagggcaagagtaaagggaactcttttcccatacctgcatgtgatcagggacttacaagtggcattttcctctatctacagatcaggccttccaaagacaggttactaatgaggttgggctgtagcaatgtgccttaatttaaaatatctatgacatccttttattaggggatacttgaatgaaaaccctcaattgtttattaaagatataagaaaggtagtactgttttaaaatctgtatttaaaattcaaaacacatttcttttctcagtcttgtccttgactttaactaccttcttctttcttctgacctatcttactttcttctgagataatgatattgtttaattttagctgttggagccactgctgtgtatcctatcgatcttgtaaaaactcgaatgcagaaccaacgatcaactggctcttttgtgggagaactcatgtataaaaacagctttgactgttttaagaaagtgctacgctatgaaggcttctttggactgtatagaggttagtgccacatgctcaatacctgttaggtgaaataacactcaaaggtttggtttctcatcttagtgcctgacatgaattagcaagactgcgttaaaatggaaatacagcagattttcaattatccatgctaatgggagtaggctggaggcatctagggcttggctaatcaaaacagcccataatctgaaaattatttatagtgctctgttgtatgttttatttcttaaaataataaattatttttataagcatcttccgtgaatttttgaaaggctcacattgtttgcatccttgaagtactctattctccagctaacagggaaaggtattctgccaccaggacaaagcctactcaggattcatgattttcctggaatacaccacaaaaaagataacgaagggttcagtagagctctcttttgctgcttcatcctgaattaaagttgccccttttcttcatctgactctcaacccaatggagttgattcacacacccctctagccaaggtttccccccactgagacagcctgaaacaggtaatccttctttctccaccttttcctttaaccatctaaggttcattaagcaatggaagtagtagcagagagtatgtcatcactgatggaaaggatcccacagaccctgactgcttttccactggcattggccgaaggagacttctcaactgttctttcggggattgccttctacgagaaggaaacagtgtttctgcatcagttaaaatacagtatcacaaggcagttcaaactcagctgctttataatttggcagcggcaaagctggcagagttttccctcctctcccctactaatgctctctctagatgaagaaaacagtatttagtactctgctgaggtggacggtgaaactggcagacatggaaacctgtgcctctgggcctcttctgccatctgctgactctagtcttcaaattaattaccccagttaaaaaaaacaaaaaggataaacctttcttgaaacctctcaccttagaagccagaaagtctcaaactccagagaagttccattttgcaggtcctattgtgtaggtaggtagcccccatcaaaggccttttgatctttgctctgccctcttttccttatcccctgcctcttcttacaatttggaaggtctttgacctcaggtgattgatgatgaccctttcagggtcactgccttccatttgaaatgcttttcttccctgatggcaacaactttgcaaatgaaatggcttccaagtagtacaaggttaatgtcacagttcctattctgcagtgagtcaggcaaaattggccgccttacctgtccatatgggtggtttttggaagggaaatctcgagtctcaagtctgggcagacatctgagcattgcttcataaactactttttgggcttttcttggtattagattaaatgtcaaggatgcctttagaattgtaagaatgcttcccaacactgctcagtgtctttaatttgcttaagttgattttttattttgagtccttttttctcgatctttgaccatacctggcaggtctgatttttggttacgtctatatttcccttttgcaacctgtactgttggcaactagaagtgtgcctgagtactgagtgctgagctaatgtgggctatgcaaagaggcttccactcttgccgtttcagttcttttatctgtaagatgagagtgactgcttttaacttctcagaggagtagtaagtcaatatattaggtacagacagaggctcactgtaaacacccaagtggcagctcttcacccttttcctggtttagaaatggccatttatctttgggtgccccaaccttaagggcaagagacagagctgtctgtcaggatgatgagtagagtgtgaatataagattagttctaggagtcacctgtgttcatttcttcctgatatcttttctggtaaaccattttaaaacaaaaaatttactgtaaaatttttgtttagtcccattctgtaatttggatcatcttgagagcaaaatgatgactgacagttcaggttaaaataataatgatacataactttgccatgaaaatgacttgttcctattcttgattggtcagggatcagttctctttagtttcttgtacatcatcaataattaataattgtatataactgcatatttgtaagtgcttattgggtaagagagatcagatgaaaatgtaggtaactcatggttattgttgttaatttaaaaaattacaatataagtaaaaaagacctgacatatttctgagactcagtattatcacctttatgtacaaagtcacattatgaaatacctatatgtgattctttgtacatttctcataaaatgtaactttattttaaaattatattattccagaggaaaactgttacgtttaaattaggaaaatatagtattgctgctattaatgctttcacctagcaatatttgagaaggtatcagagtacatctttaattcatacatgtttttaaatattgagcatagtttttagtattacagaattttgctcaacatgtaatttttctctatcaaggcctatgtaattgctcatatttcctgaatgagataatttgggaatgttgcagttgtaagatctttctcctactttaaaattacctttgtgtatactttgaaaaaagttggcatctggcctcaaagaaggtgtttttgtagcatgcgatcttattatgaggttaataaatatctctttttcttataacaagaatatcagaagctgtttttgcatttaaaagcctttccctgtggcattagaatgaaggttattttaaaagaactcttgtagtgctccaccacaagttttgttctttgcctcccccgcagctggctgcatcagaatagttgtggaagttgcttggtagtcatgagagagtgcctagcagtgctcttcaatagaaatatacctcagagagtcatgagaggtgttgtgagttggttaattcctgctctccatgtattggtataactccgttttctttatttccaggagcctctctcctatttttgtgtaagttttagttgctggaaaagagctccttaaaaatcccatgagtctggctctgcaaaccttctctacagtgcaaactacttttttcctaacaagaaaatggcaaattttcctagtttgttgttgttgttgttgttgttatttctgaaaatccaacccccaggccaagcctgtctgtattaagggaaatcacacctgagataatccaggtcttcctgaagtcacttttaaaattctttctctgtttcctccccagtcttcagagtgatttaatgtgctcaggtatttgaaatccttaatgaattacctgacaacttgtttggtttgaatgactggcataaccaaatgaatcagtcattggcctgctatagatctggcgtattaaagaacaacaattgattgggtaatcatccataattaaatgctcttaatgttccaggaataaataatttctgcttttaaactttgttgcagtcttctctctcagatctttcaggtgatgagatgagcagccttagacactggaaaatgttttgggagaatcttggggaaaaagatgtattaagagaaatatggccgggtacggtggcttatgcctgtaatcccagcactttgggagaccgaggcgggtggatcacctgaggtcaggagttcaagaccagcctggccaacatggccaaactctgtctctactaaaaatacaaaaattggctgggcataatggcgggcctgtaatcgcagctacaggctgaggcaggagaatcgcttgaacccaggaggatgcagtgatctgagattgtgccgctgcattcctgcctgggagacaagagtgaaactctgtctcaatttagaaaaaaaaagagatagaaatcagggtctatcagaaatacttcttagacgaaaatttttgtttctattgatgggagaagccctaaagaaaatctcccagaaagagtaattagatcattttatgaattaaacttaatttaagcagtgcttaacctttgaggaaattggcaaaaaaaaaaccacattttttaatcagcccattgatccaagcttgcagagttgtaaatatttctatttcaagttgtctgtgtagtgcaaagcagtcatcttccatcctggaatgttctcaaggtgacatctagaggatgttgtggtgatatctcagggagttattgatacttttatattgcagagggaagttttggcaggcagctagtttaagccaggtcccttatcattgatggtactataaaagggagtatccagattctttagaatcacagtgagattcttcattcttgcataattcatggggataaaataaactttaaaattctggcaccaaaataaaatgattgaaatttccatgactgttttgcattacttaagaacacatgcatcttgaaacaaaccatagttaatctgtgaactgcactcatgtccatccatgtccaccaaaacttttaatgattgcaaaatggataggtttgagtctttattttcttggccaatttctgcacgttttcatttagagcattaagctataaaaatatcagaagacatgtatttggttataggaagccacataagaatgagcagaagatttcaacagatcatttgttgggttagccaatctccagaaatctacagtgagctaactttagtgagcacagggcattgtaatctgagactgaggcgacacacactggatctaaggtgggtgagagaattgttagagacttgagagtgctacagtaacaactgatgaccttagaaaattggaaaaatatgacaaaaagatagacgtgtaggtatcctagagaagaggttaatgaatgaattagttccacacctcaaaaatgataatttataaccagctactgttgctgagactaaaacaagggagatagattaaacctcagtaggagggaaatagtttagatagaagaaaagataaccaggatcctgaacgttctcatgtactatggtgaaaaactgcaggagtatctgatcgttttccccaattctctttacttctagaaagccccagaatagaggagttgaggaactgatttttttccagaccataatcataatcacttattttatgttttaacactttgtctcccaaaggcatcctgagccatagctaagataacagacagtgcttgaaattttgagtgtaaataatttaacctagataaactggcatttaaatcttcatttctgcatttgtccctggctatttccccagctccactgtacagccaccttggggtagcagcccaaagagcctgtcagaactgggttgtaatgaaggctttgaaaggcgatagtgtagttgggaaggtggaaatgcctcatgcctaggggcaatctgagtcaaaagcagacagacaaatgggaggaggaggagggaggaaagaatgcttgagcaagtgaagagagaagggcatggcaacaggagcaggaataaaaagctctaaggcagggcacacaaagtgctgatagctgcagaatgaaggttaatctgatgttgaaagcaaaggggtttctcggggaagatagggacaagtgttctggtttcaatagtgaggtcagaagggtaagaatttgacatcggaggggttgctaccaggtggaaactagataacacaacagtgtgctggctgtggcttcagctacaggaataggggtgtcttctggattaatttttccttccaaagtttactgctcgtctctgccctgaataccttctgccctctattagatgctctcagctgtctttctctggtttgggctggcccctgtctcagttctatgctgagatagaactggtaactactgccttagttaccaagtttcttccttggtagtagcccctccacctctgtggtcctgctagcgttgcccagcgtggtcctttggcaccctggccactctgggttacagtagccgctcagcgtggcttcaacccactcctgaccctgcgccttcttcccagtatattcctgctctcactggttcaccaggttataacctacagcttggctctgacattcagtgccttcgaggttttaaggagtctaatattcaccatctgtagagacgggggaagcatgatgtggatgcctgctacatgggcaccatccctttgttgtgtacaagggtcaggcagggcagggtgctgacccagcctgagctgaggcctagagaaaagtttcagaacagtctagttgggaagaaatgcctttccagggcagaggaggaacttggagcagtaagtctgttagagaaaactggtaccgcagagaattaaggagcacagagccctgatttgagagtactggcaggcctgaattcaactttgagtgctactacatagtcgctcagaagttagtgacttgaaacaagctgcttagcctgtctggattccagtttccatgaaggaggaggaggaagaataagtgatagtgatgatgaagatcaacaacaacaacaaaaatccatttctgtagtctttactgtctgtacttggtactggtctgaggattttgtgagtgttaactcatttcatcttcacgactaccccgtgaaaatggcatcatgattattcccattctacagatgtggaaactaagatacaaagagattaggtaacttgtccacaattacacagctaacaaatagcaaagtcagaattgaagctcagcagcctggctccagacctcgtgttcctaatcacttggctcttttgtcacctggtagaaattacattgtgaaaagttgcttgtcagcagaggttaaggatcatttaagtttttaactataatattttatttcagcttaataacatagttgaaatgtgttgttttgtctgtgccactactttaccttgcccaaagtatacagggcccctggacacttccagaccacatgtgctctcactgcttggggacagctgttctaagataggcataatgtcatgggcacagcatgatactccttagctaatggtggactgtgaacatgattcaggctgaattgcctcttgcaaacaaaagaaatcaaggctatgtattgaaaagataggtagaaagaagcattatgtcttttggaatacataacatatgaggtaaatagtgtctggttctttgtacacttattcatataattatcaaaataaaccaatagatagtaagtagcacccttgttttgccaagagggaacctagaattcaaagaattactacccaagatcactcagtgtgaaagatgcacagacctagcattctagcccaggtctgtccacctccaaagcccatgccctagattgttcattttgctgccagcccgttggaaatagcctaaaattagtttaaattaggccagcaatattgagtttctttcataatcccttccaaccctgaaattccagttatatttctaacaggttcttaagaatagcatgctagccctctagttgaacacagtgggcccaggaacctcttttggggatgtcctgtgaagcttgagttggagacccctgatctgggcttggtccccacaccttcagctccttggtttgcgcaagggactgaattcagaggggatagtgtgatttatatctccaacccatgaaatgtgaagacaaaatactacattaatactgtaccctgtaaatcttttctcgcattagcagccttctggtagagtcgagttgccaaggaagcattgccatatgtgctgatggagctgaactaaaaggagaagattggaaaactaaccacactaataaatttcttttgaggcagttggaaaatggactgctgttttgacaagttagaaacaacacacacatccattctctgtttcaaatggttaaagtgaatttccaggacccaacagaaacatcttatattagaaacctgatttttctgctgaattacccagatgtcagatatatatgcactttagacttaattgtggttgtgatgaagtgcctcacctagactctctgctttaggcattactgggctgtgctacctctcctccctctgaggtcaaggtacaaggagggagtttggaattcccacctctttgacttttcattgtttcacagatcatgaccttcttacaaagaccatttacccaagactcatgttttcaaggcccacatctgtagtgggcctcagattataatccagtcaccttcattttcctgtttaaccagacaaggtagtcactacaagaatggttcttatcaacaacttccgtgagtggcagcatctggcctaggtcttaggaatggatttgtgctttggttttattctaagttgaagttaatcatttaatataaggaagctcggggcctctaatatattaccttaaactcctagtttctctagcttcctcaggtctctgctcttgcaaactatccttcacctgcctctagaactttttactttttgaactttactttttaccctaaaagccaccccatgcatctacagaatttggtgcatgctccttagtgggcctgggagagaagttgtgcagcgtaccaggtaagagcacaggctggagtcggacagcctgggtggaaccccgttcccccatcaaacagctgagccaccatgggcagctcccttaaagtcggcctcagtttcttcttcagttgctgtggataaaacaaaagccactgtttaagtaaggtattgtgtggattaaatgtgttcattcacataaaacacacagtactgtagtatgtggatatagcgagtgctccccaaatattggctgttgtcattatcactactattaataatattgttatttattatctggtcttctgtgatccaagcacagcctccagtgccctgactccatgccatagccttaagatgttggtgcctttgcacaccaactgtttcctctgcctgggtcaccttgccctccattctgctcattgtctcatctttccggggaacctctgctcacccttgaagtcccagggcaaatatctcctcttctttgatgttttttcccctcctgcaggcagaagaactggttctctccactgggttctcatagtcctgtgatgcccctggggtctggtatgcagcacctgctgttgttaggtggtttgtcccccatctggcaggtggagacaactagcgttccctttccctctaaactctgagcttcttagcggggaggcaccagtctcactgtgttcatcccagttcctctcagtaccaggcagacagagaaggcatttggtaaatgtttgctgaacaaatagctacttgttgccttctttgtagtcttaaatacggggttttcccttctgttttttgccgttcacaatgcattactaaatttatggtgagaaggataaatttcagtagtttgaaaggctggctgaagtgattgtatctaacacagtagtcattaggctctgtggcctgtttttttattagtcatttaaaaagactgtcacaggatagttatggagacaagagttcatcatttaaatcacagtgctttcaacccatccacaattttggtctacaatttaatgatgagaaaaatacatctagcaagtaaatgtttaactaagcattttgttacttgatgtgaatacagggagaaagatgaaaatttcaattgtgaagaggtagtttaaacaggcgtatgcccacatattactagtagaaattaatgttgtacttttattaggtaataaccaagccttctcctattatagatatcttactgaaagatcagtgagtgagtgtcatgagtatagtttaggagagaatgcttgctttggataagaatgcttgctttgcccaaatggttgcatattcccgttttttctcatatgctgcctcagctcatttaaattctaaagagcacagccccactcaagctagcaagagcttaggggggcttttgataaacattcacacaagagagaaagaaggtagaaatctcagatccaagagcaggagctgcactggaggctggcctcagtgggacccaaaggtgatggggacaggcgctcccacctgtgtgcctttcatgggctatgtgcattctctttttaatctctattccttttgctccacattctcatctgtccaccaatgcacttcctctgcttattcatggtttctgcttccttgtgatattagcacacacgtgacttccaattggctgctttccttgctccacccatgacatcttttcatcttgttgcttctgtgctaacttgtcccctcttctctaaagactgtcagtcatcctcctggagaaggcatcctaattggccagctctatttttggtagcaggctcaggttgctgaactcttgatttgcgtgtcttttaggtgttttacattgtccagtcagctgtggccctggggatgaagcaggcttagatgttatagttgcttagtgaagggctgcaaactcaggacaggtgagatggctcacacctgcaatcccaacattttggaaagcctaggcaggaggattgcttgaggccaggaatctgagactggtctgggcaacatagtgagggcttatctctttgttaaaaataaaaaatgagaaaaaacaaaaagaagcgttgcaaactcaaatgctgataggatctaggcaggttatataagtgaacaaatgcagctgggtgtgtgagatgcaggtacacatttgcacattaacacagagttgagttgtatataaagatacagattttttgagtaagatggctaaagcttgtatcccagtctcaccacttaacagctaggtaacttggaagaaattactttatctctctatgccttggtttcctctctgtagagtggttatgaagactaaatgagttaatacattttgtaaaatggtacctggcacgtaataaacgtgatgcacttttaaagaaaattttcattaacatcaccatccttatccttgtttaattccacaatgaaggacttcctcccatttttccatgaaaacatgaagctgtattcatctttttagttttccccctttataaggctatgagcaaagaaaaaattttatcaattgtgacgatatcagtaaagcaataaaaatagaaactggaggccgggcgctgtggctcacgcctgtaatcccgacactttggaaggccaaggcaggcggatcatgaggtcaggagatggagaccatgctggctaacatggtgaaaccccatctctactaaaaatacaaaaaattagccgggcgtggtggcaggcgcctatagtcccagctactcgggaggctgaggcaggagaatggcatgaacccaagaggcggagctggcagtgagccgagatcgcgccactgcactgtagcctgggcgacagagtgagactccgtcaaaaaaaaaaatacaaactggcgcttgtcctcattgaggtacgggcctcaaagcagggtgggcaccaccttgcatggtttctgtctgaaggatggagcctcatgcaatagagcagatggctgggatgtcagaaagaggcccggggtcagtcagagttcggtcagaactgagcccatgaactgactgttaggtcagtgtgttcattgatctttttttttttttgaggcagagtctcgctccattgccgggctggagtgcagtggtgcaatctcggctcactgcaacctccacctcctgggttcaagcaattctcctgtcttggcctcccaactagctgggactacaggtgcctgccaccacacccagctaatttttgtatttttagtagagacagggtttcaccttgttggtcaggctggtctcgaactcctgacctcagatgatccaccctcctcagcctcccaaagtgttgggattacaggcataagccaccgtgcctggcctcattgatctttcttacaaggaggtcagattatgtttgaaactttttgttactcaataaaacacacttataggttggatacatatggcattcaagctagtgacctctcaggctgctcctttaggaagagagtgtgggcagggctggtccctcagaagaggctgtgagtggactttcttacatagataaattagaaaattgtacttccaatgaagaatattaccatgaacctctctcagtatgacacagggtgcaacatgctcctaccttcagggttagcttggtgtgtgtttccaagaaaaaacaactgtgatttaatttttttttctttaagaagaacaaatgaaaatgatgacattttttagttcagatacgtagctccactaaatgttctaactgccttccccaaaattggtccttgttttagaaaatcaagtggtccactgatttagaaggcagaagggaaggagcagactttgggggaataatgagatttcctatatcactaatactgttgatttacccaatgtgcaaacgatccagaatgtgagatggaatgtacttgggactgatgcggctgttagaagttagtacttaaacattccatttcaaatattctcattaagggtaatagcagaaaattgcagcagagattaagcagtttttaagtggtaatcccctctgtagaactgttgatttgtttagttaatgctaatttatttaatatacttctactttttgttgatttttaggtctgttgccacagttattgggagttgccccagagaaggccataaaacttacagtaagtcttttgagttggtgcttcttattaagggattttgtacatactcaagaatctagcaggtattcttataggaaacagcaggtttgttttctcagaggtgctagctaatttgaaagcaggggaactcaccacacacattttttcattattctccatttagcagtggacatccaaaaatgtgataataaacttgaggacttttggtggttgctgccatcattgttgtcatcacagcagtagcagctaaattcccttcagtatctaccatattaggcacatgacgtatattacgttttactggtttaatctcaagcaaagcatgatccacagtttacggataaggaaactgaggcctatcgggcttaagtagcatacctgtgttcacacaaatcatgagtgggagaactagaatttaaaatcacacttgtctgactccagagcatgtctttctattacacctgctgtttttataggattcatggttagggtgtgttctataaagccaaatgtgcagggatctgggttctagttgaagttgatcctttatcagattatttgcccagtgcttggctcacatttgacagatggttgatattcagtttaagcgtttgtggaatatacaaatatttgcatcactaaggccacaaagccccagaaagtaaaactctagctttaggttgggctgcgtagctttggagcctgaaattcttcttttaccattttgttatgtgaccttgagatagctaatcttctctggcctatgtctgccaaaaagatatgactgtttcttaaaatttcttgtactacataccattttgagaatattatattaattaattaatgtaatttatgttctttgagaatccttgaggaatttttagatattgaatttcttctaagctgaaaaagtctgctcagccaaatttatctccatgatgagtactgttttagattaattcttgttagaagacttgaaagtgatttttaatcaagccttataaaacagttttaagttgtaagatgtatgtttttattttgtcactattgtcagtgtgtctcccttcttaagctattctaattgcagaacatatttttggctttcatttatcttttaacttttctcctgaaacatcagtgatgcatatatatttttcattttttaaaactattatactattaagagtacttctcaaactattttaagatctgttaaattgtgcaatttatgattactccaatagactgatagaaaaaaatagcatatattgacagatgcatatttataagtgtttaatgactttctttatatttttcatcagcttctataaatatttttcttcaaggtgaacgattttgtgagggataaatttatgcacaaagatggttcggtcccacttgcagcagaaattcttgctggaggctgcgtaagtaccttttgaagctctcttcattgaaaagacttgtttcacatatatatcactaccatggtcaacaggtgtggactaaggcttctgtttaaccacagatcctgcacaagggcagagtctactagggcacctcggcttttcctagacaggcgaaccattccagaggtggaaggg

SEQ ID NO: 14070 - DNA, 540 bp, Homo sapiens
gacgtatgaccttagcagacattgaacggattgctcctctggaagagggaactctgccctttaacttggctgaggcccagaggcagaaggcctcaggtgattcagctcgaccagttcttctacaagttgcagagtcggcctacaggtttggtctgggttctgttgctggagctgttggagccactgctgtgtatcctatcgatcttgtaaaaactcgaatgcagaaccaacgatcaactggctcttttgtgggagaactcatgtataaaaacagctttgactgttttaagaaagtgctacgctatgaaggcttctttggactgtatagaggtctgttgccacagttattgggagttgccccagagaaggccataaaacttacagtgaacgattttgtgagggataaatttatgcacaaagatggttcggtcccacttgcagcagaaattcttgctggaggctgcatcctgcacaagggcagagtctactagggcacctcggcttttcctagacaggcgaaccattccagaggtggaaggg

SEQ ID NO: 14071 - DNA, 12787 bp, Homo sapiens
actcttgaggacaaggaccttctctggacacagatatgcctcagagtaactgttgcatagcattcagacactgctggttgaattgtccatttacttggcatgccaacacatggcaaagtaaagggggaaggagattttctgctgcatgtatgtggtttgttgtaaacctttttctaataatccatttgctcaatcctctccatcccccaacaaagtaatatgatgagaatttggaaatacttgaggagttgtgcatgggtaatcgccaggtgagcacatcatggagaatcagaaattcagaacagaccttggcaggggttgtgctgtcccaaggtagatgaatctctatgactacagaaaggctgcttcaaaaggaggcacctagagaaactctcccttgtgattaaaaaagcccaggtacattagagggcaaaattcccagcaggtccaaacaatgtgttccattgctgctgtttcagccctgctagtctcagtagtaccctgggtcatcagatggcttgaaggacaagagggtgatatcctgtctcttctttgactttgttgtgctcactggcaaggagtttcattcacttctgagaattcacacactcattttattgcaggctgatgttgattctgagtttgaggatgccaacatcttttcattgcctcccagctcagttccagaagtgaaagctcagtcctagattctttttttatggtggttcatgaagatttcagttaatccatttgtggtgtccaacagcaacttgagaagagcctggtcttgacctttgcccaattttctattggtttatttgccttttcacattgatttgttctaagagcgcttgtaaatgaagaacattgcccctttgtcctatctattgcaaattttgttgttgtttttcttctcagttgttgtttaactgatttatattcactttttaaattgttatgtcaaatatttatcatttttttctttatggcttctggattatatggcttctgagtttgtcatgtttgaaatcagcttccctacttaacattacataagaaaccacctgtgcgtttttctagtactttttgaaattctctctctctccttttaaagattaactctgatccagctgtagttcttttggtataagatgaaaggtagggagccagtttaatttttgttgctcaaccccaggagttcgtgacccttcactagtgccacatcatcagctagagagacctgctgctaattcagcctgaatctgctggttcagccttcagaggaaatctgattagttcagaaagccaagatcacctccccacaggggtcaggtatctgctgctgcctcaatcagctaggctgctctgaatatgaagagtaactgggaagcaaggcgctgctagattgtctcaagttgtgctgttttcattcaattgttattctctattctcttacttttagcagatgagaaaacaagaggtcatgctgctggttaacagtggagtcagattttttttttttttttttttggagatggagtttcgctcttgttgcccaggctagagtgcagtggcacgatcttggctcactgcaacctcttgaaccctggttcaagtgattctcctacctcagcctcccgaatagccgggattacaggcatgtgccaccgtgcccggctaaatttttgtatttttagtagagactgagtttctccgtggtggtcaggctggtcttgaactcctgacctcaggtgatccacccacctcagcctcccaaagtgctgggattacaggcgtgagccactgcgcccggccgcagtggagtcagatttaaatgttccattgcaaagctcatgaaataggaaacattctatgaggggaatctggttggagaatcctggaggaagaggcatttgacttagtccttgaaagaacagcatcattttttaaacttctcattatggaaatttcccaaaaagtgcaaaactggaatagtataattaaccctcatctccctatctagccagtagtaatcatcaatttatgtcctcaatattgtttcatttatgccatgccctctttcctccttccatccctacttttttttttttaattaaatttttgtttttggagacaggatgttgctctgtcacccaggctggcgtgcagtggcgcgattatggctcactgcggtctcaaccaacagtcctcccacctcagcctcctgagtagttgggactacaggcacatgccaccatgcctggctaattcatccccatatgtttttcaaagcaaactcagccatcctatctgtaaatattttatgtatctctaaacaagatttcttcaaagcacaatcacaatatcattattatactttaaaaaattataataattcttcaatatcttcaaataggtgttctgtacacattgtacacatttcccgtattgtcttaaaattttttaaatagttgttgaattgtgatgtatataaggttcatgcattacaactgatgtgtcttaattttctttatttttttttttaaattacaaagctacctttatacttttaagccccacaggaataaaaaacactgggaagggctaaccccctcaccccaggagtggcccatagggagagaggctacctgaggggaaggaagtacaaaagggacccaccgcagactcatggcaaagggaagccatcggtgctgggacctgtggtcactacaggaggaaatgcgagtgtggtgggactggctccaggcacacaagtgaagggcaagagagattggagtgaagccacaaagctacttgggttcctccttcttctcgtttgcctttttctgcttctgctgcatgatctcctgagtccctgggggtagagatgatagggcactaggaggtatcagagggcaaaaagaacaaaatgcagagggatgaagggcacaaaagagaagatggaagtggatgggactaagctcaccgtttggctgctgtactcccatcctaggagaagaagaggaagagagctgaggctcaaaaggcaatcagtctccatcctgcagttgcccaagaggtcagaagtctggccacataggcccaaggctctctaccgtttggctgctgtactcccatcgtaggagaacaagaggaagagagctgaggctcaaaaggcaagcagtctccatcctgcagttgcccaagaggtcagaagtctggccacacaggcccaaggctctctattcttacaccagtaagaaggttgggagaagggaggagaaccgggaacagcaaggagggccagaagcactgggctgtcataaccacaggtgtatctgaaatgggaagctccctgcccttgccctgaaggtcagactgggggatgctcagaaatcagactcttgtgtcctaattttcttttgatctctggattctcttgcctgctcaatactgtgctttcttttcctctgaaggacagtgtcacataatggctgaaatcatagatttgcaatcaaattagggctctgccacttgctaactgtgtgacttggggaagttactcaacctctctgtgcctcagtttcctcatctgtaaaatggacataacggtgtctactcctcagggctgttgagagtgtcagtaagctaatgtttgcaaagcattagagtcatgtcaaaagctgtgggctgtggaatagggcccaggagggctcactcaagtgagatggtgtgtcgtctttgagatgagcctccagctgtgcagagagcccctttccttttcctttttgcttccttctggttcttgacgtgcttcagttagatgaggttgatagcaggaatttggacaggtaaggcatatttaatggaagcaacttctttattgtcctttcatttttggcttcctcttcctctgtatttattaaattagcttttctctctcagaagtgtttaactttttatggcattatctgggcttcagcaacttgtgatctcctaagtagagcttttcagcactttataaatacgtcatatactttttatattcctttgttccccatcaggaacatagccccagtcttcagaatagcacaatcagtttttattcatttaaggagcagtagtaatttgacacttgctaatatgtaacaaattatattgggcgtggtaattacaattgcagctggttcctaattatactgtaaccttgatgcttacaaaaattgagactgaattcagcataaaatactggagaataatattctgcactaggcatttctgccttctactgagccatgggcatttatgaatcataatgccaaattaaaaagaatttattttaaattggttacaattacaatgttgtccagtgtctccattcttaaaggtagctttaaagtccccctttttgcttgctaaactctgggaatatccttcaggtattataattagtgtctaaataacctgagctcaggggtcatttctggctgtgtgatctactggtattcatttaagactctttagtacctcagcttctttatttgaaaagtggggatattactcactcttccccttaaagagttttaatgatacagtatataaatgaaataagataaaaagccattagcataatgcctggcatagagttaaggacccagtaaaagttagctggtcattgttatcgttataattaataataagtgatccggctccaaagactgcctctgtgaccctcaactttagcagaattagtgtattaattctcctgccactctgccttatgatagcatgtatcatcatacattttgtaccaaccacttgtcgataagtcagctttccctgcttggggcagggtttctgatttattgggtgttttctcctcggtgcctggcgctgggcctagtacactgcagctttcccataggtgattgtgttgcatggatgagcaagtagagcatcaccatctaaggagtggttgttagctggggggtggggtagtttggcccccaagaggatttcttttagcaacctctggagacagtttcttggttgttgcagcttgttggggaaggggttgctactcccatctagcaggtagaggtcagcttaataacaataatagtaaaatccagaactagtatgtttcaggctcttttggcataacagaacccagctaaaacaccaccattcattcttaactgttatactctgcctcttaatatcagaattttaatgatgatggctttctagtttatgttctacaacagagcagagtgaaatctaacatacatcacaacctactgaatccttctgataaacatctctagtgcctctgaaatgactcgctgatgtaattacccagtgggttaacatttgtggtgtctgatactttataagtcaactgttgagtgaaatgaagttttgccagctgattacatagaaatgttgtggtttgaagaatgcttaacagggcatcttgtctttgtactaatttatatttcagtaacttttcccataatgactgctcttcatttattaggtcgtagggaaactgtaggatgaaggatgagtgactcagtggtttcaataaaaaattattttcttaagtttgagatacctttttcttcttctcaagttaatggtaactgtggttttagggaattccaaactttcttttgcaattactgattgtatcagtcagggctcactcgcagagaacagaatctactctagctggtttaagcagagagagatttattacaggatattaaatggcttacacaatttgttgggaaggtaaagaaacagacttgaggttgagctctaaagaatgacgtctagagtctcaagcagagcaggccaccaagacagcagtgacctcctgtgcagtcacaatgctgcctgccaagtggagagtgtttcaggaccatgtggccactgacatgggagggcaggaggttgccacaggaaaactagacacttccagcaatggtgcgtgcttggcagaaacagcagaaggtgccccccaactcccaaacatttgccaaatctcactcaatttcatctaattgatggcacataggccgcatagcagcaagggagtctgggaattgtagtttcagccttctagtgtctttagtataggaagataaagaaggagggtgggcccctgcttctaagtggttaggttacacccaagaatacttttctttgggattcagggccatctactgcactatttcctcaggttcaaaagactatgcaggactgtttctccttctctctccgtttcctgcttgtcactgcatgcttatttacacccacccacccacacacacacccagaagcttgcttttgatgagctacctctttgagtttgtagttcttatctaaggcaaatatttactttatgatagtagaattttcagtgtaagtctgtgcttgtcttggctttcagatgtttcaggtttgggagggtgactggggaagtattgctgaggaagggctgtgctgtacagttggtgacgtagcagctgaggttgggcctcgggtcctaacgcagttgttctcagtccacccacacatggtaatttcttgagggagctctaaagatatccattctagaaattttcatttgattgacctttggtatggtttgggttttgtaaaacctaaaagcacctcaggggacttgaatatgcagcgaggactgagaacctacatcttataatccgtacattaaaattggacattatctaaagctgtggttcttaaactttaactgcatcagggtcacctggagggcttgttaaatcataggggattgctgggcctcacccagtttctgattctttgggtctgggatgggtgtgataatttgtatttttaaaagttcccaggtgatgctgatggtctccacactttgagaaccattggtctgaagagagttgcctattttcattgtaaatgtcagatttttactgacctgaaagactttattctatattcagcacttccagagaatctactttgtttcctgatctttgccagagttggggttgatctgaggagtaaggtgccctcacagagatggtggtctcacatctctacagcctcccagtgaaagaggagagctttgcttttctttgcattttatttttcaaattagcatttcttattttcgtgtaggttttcttatattcttccccaccatcctctcttagatctgacaactattttgaatacaccattctataccactgtgatttgttaaagtaatgagcctgcaactgtggcttgattcccttgtaagaaagtctgtttaaaaaatattcctacaggtaggaattttctggtgaccccctacctatggctgctctaactcatattaggagagtgaattcatttgtcctgaaagatgacttttgtattcttcttgccatgttctcccctaccccctgcctttttaaaaacaccagttcttgaaattgtgttattgtttttctttttatttctaggatgtacctacctagtatgtgttttgcaaacgctattgatgacttacacaattataaccagtgtttatcttgtcaaaaagttttacatattcagtgattctcaaattttgctcctgtggagcatagactcattgaatcgacctgaaatttccatactaaatttaaataatgatagacttttcccagtttatggaagaaactatgcatagagtttttctgttccaacattgccactttctgggccaggcatggtggctcatgcttgtaaacccagcactttgggaggccaagatggaaggatcacttgaggccaggagtttgagactagcttgagcaacatagtgagactgtctctacaaaaaaattaaaaaattagtggggcctggtgacacatgcatttagcctcagctactcaggaggctgaggtgggaggattgcttgagcccaggagtgtgaggctgcagtaagccatgatcgcaccactgcactccagcctgagtgacacaatgagacccccaactaaaaaaaaaaaaaacaaaacaccaaaaccctctctttttcccttaaatttggaatcagagtaaaatgttatcaaatttcaacaaaattctttatcttgttagcaaataatatttcatagtaatctgtaaaggacccctttcttcttagtgaattactctgtatgtttgaaaaccagttacttgatttaaaattcttgatataaaatttttgttttaatgttggaatccattcttacaaatgcaaattcagaagaagaatcataaagaaaatcaggcagttataacaatagtagctgtaaatatttgcatgctattaatatatgagaaaaaaatgtaacagtgaaagtaagccttctggaaacaatctaaagtttgatgactcttctaaaccccaagaatgaacgaagtctaataattccaggcttctaaagcccaagaatgaactaagtctaataatcccaagcttatgtgatgcaaagtatgcatgctggacagctgttctgaattgactttaaaagggtggctacatttctgtggcttcctttttccagctcatagaacttcctgggtattggttttgccaccaggtagaattcattgaaatacacctttaaaaaactggtacatctcatggtaactttgcattgtcttcaattaagttgtgtaagtgttcttcattcatagcaaatgacacttaaaacaagaagataggaatgggaggtagcagtataaatggaaattccgaacagccacacagcatttgactggtgaataatagatggaattactatagagatgaggcccaggaggctggtagtaatttttctgaatccatcccctgttgaaccatacttatctatccttaaatagaatgtaccaggacctgagccaaattttagtgggcctcagagaaatcttgtggtgatcattaaccatttgctgtacctggaactctgggttgggggtagggtagctgagacaattatcagttaggatggccacaatgtttatttagtggtttggtgagtgtgtttgaagacccatgagtttctcttctcttttgctaatttatcccttctaaattatgagccagtttacccatcatttagatttcttaaggagtaaacatggtagaacataaacatctttggataaataatacaaatagtaatagataccatttattgagcactttaactgtgtggcccttttggtgctaagcactttgtgtaattatctcatattacttttctagctgtctaggactccccattttataaatgaggaaagtgaggctgagaggtcagggcctccaagtcacatggccagtgagtttatgaggttggtcctgctccctatttgaggatgatctgacactaaggccatgttctttttttttaatgaagatggggtgtcactatgttgcccaggctaatctcaaactccagggctcaagtgatcctcccaccttggcctcccaaagtgctgggattataggtatgagccaccattcctgtaagatcatgtccttaatcacagcattggacagacactacacactgttaggagaaattgggagagttttgatttttaggcttgtactatattgcagttatgtaccacataaggatgttttcatcaatgaaggactgcatatatgatggtggctccataaattatagtggagctgccctgtacaggtgttccactttttatcttttaaaaccatatttttaccacaccttttctatgtttagatacttgttttacagttgcctacagtaatcagtataggaacatgctgtatagatttgtagcctaggagcaataggctatctcatttgcctaggtatgtagtaggctacaccatctaggtttgtataagtacactatatgatgttcacacaatgatgaaatcacttaacaatgcatttttcagaatgttatcctgttgttaagtgatgcatgactgtattatattgccagctaatgcaagttatcaacactttgaagctgcctgtaatgtgggtctgtaggaaggccactacggtaagagatggaatatttgggatctgatctcagctcagaaaacatttagaaatgtcagcacagattggcacttaatctgactttttgggggaaataattgatgctttctgagctttggtttcctcttctgtaaaattagggcagtaatatccatcttatctgactgatttgcagtgagaatccaacgagataatagtcttgcttagaaaactgtaaatgttaggcaacatgccttataagtgttgggtcattctctgtctttgttttgatttgtgttctctgccctagaccctgagaaggttacaaagtgaacactttttttccccctttgaggtgtagttctgatggggagcactgaatatacatttcaggatccttaagcagaaatgtgctatgaaaattgagggcaggggaggttcactctgaaatagcattgcccaggcaagaccttacaaagttcatggcataaagaattaattctattttagaattacgaagaatacttcattttgtggaaaatttattttgcttttaagaggaaaacagttaagaacttagggtaccatatgcttttgaaaaaagtgttatgtacttccatgagatgtgggactcttaccatcaaggaggagatttttctgctcttaaagtggaggatgggggcattttatgctgtcccatcttctcttgtgttcgtcctaccctacctttctcagaatagagacctgagaggagggagtcctctctgaagcttttagggcagcagagtcattcatcttaggttaactagcagtacattttcttctcctctattgaacagcagagaacacttactaattcaggatttttaaaaagattaaaaattcatggctgggcacagtggctcatgcctgtaatcccagcgttttgggagtctgaggcgggcagatcacctaaggtcacgagttggagaccagcctggccaacatggtaaaaccccatctgtactaaaaataaaaaattagccgggcatggtggtgcatgcctataatcccaactacttgggaggctgaggcaggagaatcgtttgaacctgggaggctgaggttgcagtgagctaagactgcatcattgcactccagcctgggcaacaagagtgaaactccatctcaaagaaaaaaaaaaaagtattacaaattcttatgaatagccttggtggttacaagcactcagctgaaatgaagagttatcagtcttgctttgggaaacaaggtgaccaaccatctggtttcagaaagactactcccattctagtgattagttaataaaattattcctgacagtggagagcctaggagctcaggcagttccatatttagagacagagaactcattgtccaaagatctcagaacagccttcactagctcacagaagggatttaggacaatttgcataagtttccctgtggatagcaacatgggtccagtgttgggtggttccaggaacctctccttggcttcatcatggggtggctctgtgcttggtgggaacccagtctcatgatgttttttgctaggaggattgggtgttgggacattgaataaacccactgtttggttccacataagggctcttttgtgttggcctgaggaagccatgttgaagtttgtcttgcttttccccagcaatgtttttggactttgtggcctgcagaattaagcacaacacccattctgagctaatctgtcaatttttgctcttcaaagataaccacagccacttgtatttctaaaatatgtagaataatatcatacctttggagacctatgatttattaattaaaaactgaggagaggaggagaggttctttggcatgcccaggtagtgaggtatacatgcctgttcatggtgaaactgtgagaagtaactcccttgagttaatatgatttccctagttcactgacttctttaagaaatatgttctcttggctgggcacgatggctcacgcctgtaatcttagcactttgggaggctgaggcgggcagatcacttgaggtcaggagtttgagaccagcctggccaacatggtgaaaccctatctctactaaaaatacataaattagctgggagtggtagtacgcgcctgcaatcccagctactcaggaggctgaggcaggagaatcgcttgaacctgggaggcagaggttgcagtgagccgagattgcaccactacactccagcctgggcaacagagagagactgtctcagaaaaaaaaaaaagaaatatgttctcttgcatagttgacaaacatttgtttacttaaattctcctgtgaaagggcatggtttacactggattataagtaaaaaatgacaggtgtttgcaatgtttcaccttttctttttaagaaatgatatacattcaacattagatattaagagattttgctactggttccttgcataaaattttatcattttagaagctgcataaggagtctaatttaaaatgggaagggggcatagtttatgcactggggcaacatggtatttaagtacaaaaatgaaatgcactaatttttaatctgagatttattttcctttagtcggctagcttgatttctcagctttgttgtaataacataaacatttttatgtttatttataggtggctttaaccaagagagcagatccagctgagcttagaacaatatttttgaag

SEQ ID NO: 14072 - DNA, 201 bp, Homo sapiens
actcttgaggacaaggaccttctctggacacagatatgcctcagagtaactgttgcatagcattcagacactgctggttgaattgtccatttacttggcatgccaacacatggcaaagtaaagggggaaggagattttctgctgcatgtggctttaaccaagagagcagatccagctgagcttagaacaatatttttgaag

SEQ ID NO: 14073 - DNA, 578 bp, Homo sapiens
aaggcctcaggtgattcagctcgaccagttcttctacaagttgcagagtcggcctacaggtttggtctgggttctgttgctggagctgttggagccactgctgtgtatcctatcgatcttgtaaaaactcgaatgcagaaccaacgatcaactggctcttttgtgggagaactcatgtataaaaacagctttgactgttttaagaaagtgctacgctatgaaggcttctttggactgtatagaggtctgttgccacagttattgggagttgccccagagaaggccataaaacttacagtgaacgattttgtgagggataaatttatgcacaaagatggttcggtcccacttgcagcagaaattcttgctggaggctgcggttgtagttgtgggagttctgatggagacttggaccttcagtcttccctgcatgaggctggaggctcccaggtgattttcacaaatcctttagaaatcgtcaagatccgtttgcaagtggcaggagaaatcaccactggtcctcgagtcagtgctctgtctgtcgtgcgggacctggggttttttgggatctacaaggt

SEQ ID NO: 14074 - DNA, 14531 bp, Homo sapiens
aggtagtactgttttaaaatctgtatttaaaattcaaaacacatttcttttctcagtcttgtccttgactttaactaccttcttctttcttctgacctatcttactttcttctgagataatgatattgtttaattttagctgttggagccactgctgtgtatcctatcgatcttgtaaaaactcgaatgcagaaccaacgatcaactggctcttttgtgggagaactcatgtataaaaacagctttgactgttttaagaaagtgctacgctatgaaggcttctttggactgtatagaggttagtgccacatgctcaatacctgttaggtgaaataacactcaaaggtttggtttctcatcttagtgcctgacatgaattagcaagactgcgttaaaatggaaatacagcagattttcaattatccatgctaatgggagtaggctggaggcatctagggcttggctaatcaaaacagcccataatctgaaaattatttatagtgctctgttgtatgttttatttcttaaaataataaattatttttataagcatcttccgtgaatttttgaaaggctcacattgtttgcatccttgaagtactctattctccagctaacagggaaaggtattctgccaccaggacaaagcctactcaggattcatgattttcctggaatacaccacaaaaaagataacgaagggttcagtagagctctcttttgctgcttcatcctgaattaaagttgccccttttcttcatctgactctcaacccaatggagttgattcacacacccctctagccaaggtttccccccactgagacagcctgaaacaggtaatccttctttctccaccttttcctttaaccatctaaggttcattaagcaatggaagtagtagcagagagtatgtcatcactgatggaaaggatcccacagaccctgactgcttttccactggcattggccgaaggagacttctcaactgttctttcggggattgccttctacgagaaggaaacagtgtttctgcatcagttaaaatacagtatcacaaggcagttcaaactcagctgctttataatttggcagcggcaaagctggcagagttttccctcctctcccctactaatgctctctctagatgaagaaaacagtatttagtactctgctgaggtggacggtgaaactggcagacatggaaacctgtgcctctgggcctcttctgccatctgctgactctagtcttcaaattaattaccccagttaaaaaaaacaaaaaggataaacctttcttgaaacctctcaccttagaagccagaaagtctcaaactccagagaagttccattttgcaggtcctattgtgtaggtaggtagcccccatcaaaggccttttgatctttgctctgccctcttttccttatcccctgcctcttcttacaatttggaaggtctttgacctcaggtgattgatgatgaccctttcagggtcactgccttccatttgaaatgcttttcttccctgatggcaacaactttgcaaatgaaatggcttccaagtagtacaaggttaatgtcacagttcctattctgcagtgagtcaggcaaaattggccgccttacctgtccatatgggtggtttttggaagggaaatctcgagtctcaagtctgggcagacatctgagcattgcttcataaactactttttgggcttttcttggtattagattaaatgtcaaggatgcctttagaattgtaagaatgcttcccaacactgctcagtgtctttaatttgcttaagttgattttttattttgagtccttttttctcgatctttgaccatacctggcaggtctgatttttggttacgtctatatttcccttttgcaacctgtactgttggcaactagaagtgtgcctgagtactgagtgctgagctaatgtgggctatgcaaagaggcttccactcttgccgtttcagttcttttatctgtaagatgagagtgactgcttttaacttctcagaggagtagtaagtcaatatattaggtacagacagaggctcactgtaaacacccaagtggcagctcttcacccttttcctggtttagaaatggccatttatctttgggtgccccaaccttaagggcaagagacagagctgtctgtcaggatgatgagtagagtgtgaatataagattagttctaggagtcacctgtgttcatttcttcctgatatcttttctggtaaaccattttaaaacaaaaaatttactgtaaaatttttgtttagtcccattctgtaatttggatcatcttgagagcaaaatgatgactgacagttcaggttaaaataataatgatacataactttgccatgaaaatgacttgttcctattcttgattggtcagggatcagttctctttagtttcttgtacatcatcaataattaataattgtatataactgcatatttgtaagtgcttattgggtaagagagatcagatgaaaatgtaggtaactcatggttattgttgttaatttaaaaaattacaatataagtaaaaaagacctgacatatttctgagactcagtattatcacctttatgtacaaagtcacattatgaaatacctatatgtgattctttgtacatttctcataaaatgtaactttattttaaaattatattattccagaggaaaactgttacgtttaaattaggaaaatatagtattgctgctattaatgctttcacctagcaatatttgagaaggtatcagagtacatctttaattcatacatgtttttaaatattgagcatagtttttagtattacagaattttgctcaacatgtaatttttctctatcaaggcctatgtaattgctcatatttcctgaatgagataatttgggaatgttgcagttgtaagatctttctcctactttaaaattacctttgtgtatactttgaaaaaagttggcatctggcctcaaagaaggtgtttttgtagcatgcgatcttattatgaggttaataaatatctctttttcttataacaagaatatcagaagctgtttttgcatttaaaagcctttccctgtggcattagaatgaaggttattttaaaagaactcttgtagtgctccaccacaagttttgttctttgcctcccccgcagctggctgcatcagaatagttgtggaagttgcttggtagtcatgagagagtgcctagcagtgctcttcaatagaaatatacctcagagagtcatgagaggtgttgtgagttggttaattcctgctctccatgtattggtataactccgttttctttatttccaggagcctctctcctatttttgtgtaagttttagttgctggaaaagagctccttaaaaatcccatgagtctggctctgcaaaccttctctacagtgcaaactacttttttcctaacaagaaaatggcaaattttcctagtttgttgttgttgttgttgttgttatttctgaaaatccaacccccaggccaagcctgtctgtattaagggaaatcacacctgagataatccaggtcttcctgaagtcacttttaaaattctttctctgtttcctccccagtcttcagagtgatttaatgtgctcaggtatttgaaatccttaatgaattacctgacaacttgtttggtttgaatgactggcataaccaaatgaatcagtcattggcctgctatagatctggcgtattaaagaacaacaattgattgggtaatcatccataattaaatgctcttaatgttccaggaataaataatttctgcttttaaactttgttgcagtcttctctctcagatctttcaggtgatgagatgagcagccttagacactggaaaatgttttgggagaatcttggggaaaaagatgtattaagagaaatatggccgggtacggtggcttatgcctgtaatcccagcactttgggagaccgaggcgggtggatcacctgaggtcaggagttcaagaccagcctggccaacatggccaaactctgtctctactaaaaatacaaaaattggctgggcataatggcgggcctgtaatcgcagctacaggctgaggcaggagaatcgcttgaacccaggaggatgcagtgatctgagattgtgccgctgcattcctgcctgggagacaagagtgaaactctgtctcaatttagaaaaaaaaagagatagaaatcagggtctatcagaaatacttcttagacgaaaatttttgtttctattgatgggagaagccctaaagaaaatctcccagaaagagtaattagatcattttatgaattaaacttaatttaagcagtgcttaacctttgaggaaattggcaaaaaaaaaaccacattttttaatcagcccattgatccaagcttgcagagttgtaaatatttctatttcaagttgtctgtgtagtgcaaagcagtcatcttccatcctggaatgttctcaaggtgacatctagaggatgttgtggtgatatctcagggagttattgatacttttatattgcagagggaagttttggcaggcagctagtttaagccaggtcccttatcattgatggtactataaaagggagtatccagattctttagaatcacagtgagattcttcattcttgcataattcatggggataaaataaactttaaaattctggcaccaaaataaaatgattgaaatttccatgactgttttgcattacttaagaacacatgcatcttgaaacaaaccatagttaatctgtgaactgcactcatgtccatccatgtccaccaaaacttttaatgattgcaaaatggataggtttgagtctttattttcttggccaatttctgcacgttttcatttagagcattaagctataaaaatatcagaagacatgtatttggttataggaagccacataagaatgagcagaagatttcaacagatcatttgttgggttagccaatctccagaaatctacagtgagctaactttagtgagcacagggcattgtaatctgagactgaggcgacacacactggatctaaggtgggtgagagaattgttagagacttgagagtgctacagtaacaactgatgaccttagaaaattggaaaaatatgacaaaaagatagacgtgtaggtatcctagagaagaggttaatgaatgaattagttccacacctcaaaaatgataatttataaccagctactgttgctgagactaaaacaagggagatagattaaacctcagtaggagggaaatagtttagatagaagaaaagataaccaggatcctgaacgttctcatgtactatggtgaaaaactgcaggagtatctgatcgttttccccaattctctttacttctagaaagccccagaatagaggagttgaggaactgatttttttccagaccataatcataatcacttattttatgttttaacactttgtctcccaaaggcatcctgagccatagctaagataacagacagtgcttgaaattttgagtgtaaataatttaacctagataaactggcatttaaatcttcatttctgcatttgtccctggctatttccccagctccactgtacagccaccttggggtagcagcccaaagagcctgtcagaactgggttgtaatgaaggctttgaaaggcgatagtgtagttgggaaggtggaaatgcctcatgcctaggggcaatctgagtcaaaagcagacagacaaatgggaggaggaggagggaggaaagaatgcttgagcaagtgaagagagaagggcatggcaacaggagcaggaataaaaagctctaaggcagggcacacaaagtgctgatagctgcagaatgaaggttaatctgatgttgaaagcaaaggggtttctcggggaagatagggacaagtgttctggtttcaatagtgaggtcagaagggtaagaatttgacatcggaggggttgctaccaggtggaaactagataacacaacagtgtgctggctgtggcttcagctacaggaataggggtgtcttctggattaatttttccttccaaagtttactgctcgtctctgccctgaataccttctgccctctattagatgctctcagctgtctttctctggtttgggctggcccctgtctcagttctatgctgagatagaactggtaactactgccttagttaccaagtttcttccttggtagtagcccctccacctctgtggtcctgctagcgttgcccagcgtggtcctttggcaccctggccactctgggttacagtagccgctcagcgtggcttcaacccactcctgaccctgcgccttcttcccagtatattcctgctctcactggttcaccaggttataacctacagcttggctctgacattcagtgccttcgaggttttaaggagtctaatattcaccatctgtagagacgggggaagcatgatgtggatgcctgctacatgggcaccatccctttgttgtgtacaagggtcaggcagggcagggtgctgacccagcctgagctgaggcctagagaaaagtttcagaacagtctagttgggaagaaatgcctttccagggcagaggaggaacttggagcagtaagtctgttagagaaaactggtaccgcagagaattaaggagcacagagccctgatttgagagtactggcaggcctgaattcaactttgagtgctactacatagtcgctcagaagttagtgacttgaaacaagctgcttagcctgtctggattccagtttccatgaaggaggaggaggaagaataagtgatagtgatgatgaagatcaacaacaacaacaaaaatccatttctgtagtctttactgtctgtacttggtactggtctgaggattttgtgagtgttaactcatttcatcttcacgactaccccgtgaaaatggcatcatgattattcccattctacagatgtggaaactaagatacaaagagattaggtaacttgtccacaattacacagctaacaaatagcaaagtcagaattgaagctcagcagcctggctccagacctcgtgttcctaatcacttggctcttttgtcacctggtagaaattacattgtgaaaagttgcttgtcagcagaggttaaggatcatttaagtttttaactataatattttatttcagcttaataacatagttgaaatgtgttgttttgtctgtgccactactttaccttgcccaaagtatacagggcccctggacacttccagaccacatgtgctctcactgcttggggacagctgttctaagataggcataatgtcatgggcacagcatgatactccttagctaatggtggactgtgaacatgattcaggctgaattgcctcttgcaaacaaaagaaatcaaggctatgtattgaaaagataggtagaaagaagcattatgtcttttggaatacataacatatgaggtaaatagtgtctggttctttgtacacttattcatataattatcaaaataaaccaatagatagtaagtagcacccttgttttgccaagagggaacctagaattcaaagaattactacccaagatcactcagtgtgaaagatgcacagacctagcattctagcccaggtctgtccacctccaaagcccatgccctagattgttcattttgctgccagcccgttggaaatagcctaaaattagtttaaattaggccagcaatattgagtttctttcataatcccttccaaccctgaaattccagttatatttctaacaggttcttaagaatagcatgctagccctctagttgaacacagtgggcccaggaacctcttttggggatgtcctgtgaagcttgagttggagacccctgatctgggcttggtccccacaccttcagctccttggtttgcgcaagggactgaattcagaggggatagtgtgatttatatctccaacccatgaaatgtgaagacaaaatactacattaatactgtaccctgtaaatcttttctcgcattagcagccttctggtagagtcgagttgccaaggaagcattgccatatgtgctgatggagctgaactaaaaggagaagattggaaaactaaccacactaataaatttcttttgaggcagttggaaaatggactgctgttttgacaagttagaaacaacacacacatccattctctgtttcaaatggttaaagtgaatttccaggacccaacagaaacatcttatattagaaacctgatttttctgctgaattacccagatgtcagatatatatgcactttagacttaattgtggttgtgatgaagtgcctcacctagactctctgctttaggcattactgggctgtgctacctctcctccctctgaggtcaaggtacaaggagggagtttggaattcccacctctttgacttttcattgtttcacagatcatgaccttcttacaaagaccatttacccaagactcatgttttcaaggcccacatctgtagtgggcctcagattataatccagtcaccttcattttcctgtttaaccagacaaggtagtcactacaagaatggttcttatcaacaacttccgtgagtggcagcatctggcctaggtcttaggaatggatttgtgctttggttttattctaagttgaagttaatcatttaatataaggaagctcggggcctctaatatattaccttaaactcctagtttctctagcttcctcaggtctctgctcttgcaaactatccttcacctgcctctagaactttttactttttgaactttactttttaccctaaaagccaccccatgcatctacagaatttggtgcatgctccttagtgggcctgggagagaagttgtgcagcgtaccaggtaagagcacaggctggagtcggacagcctgggtggaaccccgttcccccatcaaacagctgagccaccatgggcagctcccttaaagtcggcctcagtttcttcttcagttgctgtggataaaacaaaagccactgtttaagtaaggtattgtgtggattaaatgtgttcattcacataaaacacacagtactgtagtatgtggatatagcgagtgctccccaaatattggctgttgtcattatcactactattaataatattgttatttattatctggtcttctgtgatccaagcacagcctccagtgccctgactccatgccatagccttaagatgttggtgcctttgcacaccaactgtttcctctgcctgggtcaccttgccctccattctgctcattgtctcatctttccggggaacctctgctcacccttgaagtcccagggcaaatatctcctcttctttgatgttttttcccctcctgcaggcagaagaactggttctctccactgggttctcatagtcctgtgatgcccctggggtctggtatgcagcacctgctgttgttaggtggtttgtcccccatctggcaggtggagacaactagcgttccctttccctctaaactctgagcttcttagcggggaggcaccagtctcactgtgttcatcccagttcctctcagtaccaggcagacagagaaggcatttggtaaatgtttgctgaacaaatagctacttgttgccttctttgtagtcttaaatacggggttttcccttctgttttttgccgttcacaatgcattactaaatttatggtgagaaggataaatttcagtagtttgaaaggctggctgaagtgattgtatctaacacagtagtcattaggctctgtggcctgtttttttattagtcatttaaaaagactgtcacaggatagttatggagacaagagttcatcatttaaatcacagtgctttcaacccatccacaattttggtctacaatttaatgatgagaaaaatacatctagcaagtaaatgtttaactaagcattttgttacttgatgtgaatacagggagaaagatgaaaatttcaattgtgaagaggtagtttaaacaggcgtatgcccacatattactagtagaaattaatgttgtacttttattaggtaataaccaagccttctcctattatagatatcttactgaaagatcagtgagtgagtgtcatgagtatagtttaggagagaatgcttgctttggataagaatgcttgctttgcccaaatggttgcatattcccgttttttctcatatgctgcctcagctcatttaaattctaaagagcacagccccactcaagctagcaagagcttaggggggcttttgataaacattcacacaagagagaaagaaggtagaaatctcagatccaagagcaggagctgcactggaggctggcctcagtgggacccaaaggtgatggggacaggcgctcccacctgtgtgcctttcatgggctatgtgcattctctttttaatctctattccttttgctccacattctcatctgtccaccaatgcacttcctctgcttattcatggtttctgcttccttgtgatattagcacacacgtgacttccaattggctgctttccttgctccacccatgacatcttttcatcttgttgcttctgtgctaacttgtcccctcttctctaaagactgtcagtcatcctcctggagaaggcatcctaattggccagctctatttttggtagcaggctcaggttgctgaactcttgatttgcgtgtcttttaggtgttttacattgtccagtcagctgtggccctggggatgaagcaggcttagatgttatagttgcttagtgaagggctgcaaactcaggacaggtgagatggctcacacctgcaatcccaacattttggaaagcctaggcaggaggattgcttgaggccaggaatctgagactggtctgggcaacatagtgagggcttatctctttgttaaaaataaaaaatgagaaaaaacaaaaagaagcgttgcaaactcaaatgctgataggatctaggcaggttatataagtgaacaaatgcagctgggtgtgtgagatgcaggtacacatttgcacattaacacagagttgagttgtatataaagatacagattttttgagtaagatggctaaagcttgtatcccagtctcaccacttaacagctaggtaacttggaagaaattactttatctctctatgccttggtttcctctctgtagagtggttatgaagactaaatgagttaatacattttgtaaaatggtacctggcacgtaataaacgtgatgcacttttaaagaaaattttcattaacatcaccatccttatccttgtttaattccacaatgaaggacttcctcccatttttccatgaaaacatgaagctgtattcatctttttagttttccccctttataaggctatgagcaaagaaaaaattttatcaattgtgacgatatcagtaaagcaataaaaatagaaactggaggccgggcgctgtggctcacgcctgtaatcccgacactttggaaggccaaggcaggcggatcatgaggtcaggagatggagaccatgctggctaacatggtgaaaccccatctctactaaaaatacaaaaaattagccgggcgtggtggcaggcgcctatagtcccagctactcgggaggctgaggcaggagaatggcatgaacccaagaggcggagctggcagtgagccgagatcgcgccactgcactgtagcctgggcgacagagtgagactccgtcaaaaaaaaaaatacaaactggcgcttgtcctcattgaggtacgggcctcaaagcagggtgggcaccaccttgcatggtttctgtctgaaggatggagcctcatgcaatagagcagatggctgggatgtcagaaagaggcccggggtcagtcagagttcggtcagaactgagcccatgaactgactgttaggtcagtgtgttcattgatctttttttttttttgaggcagagtctcgctccattgccgggctggagtgcagtggtgcaatctcggctcactgcaacctccacctcctgggttcaagcaattctcctgtcttggcctcccaactagctgggactacaggtgcctgccaccacacccagctaatttttgtatttttagtagagacagggtttcaccttgttggtcaggctggtctcgaactcctgacctcagatgatccaccctcctcagcctcccaaagtgttgggattacaggcataagccaccgtgcctggcctcattgatctttcttacaaggaggtcagattatgtttgaaactttttgttactcaataaaacacacttataggttggatacatatggcattcaagctagtgacctctcaggctgctcctttaggaagagagtgtgggcagggctggtccctcagaagaggctgtgagtggactttcttacatagataaattagaaaattgtacttccaatgaagaatattaccatgaacctctctcagtatgacacagggtgcaacatgctcctaccttcagggttagcttggtgtgtgtttccaagaaaaaacaactgtgatttaatttttttttctttaagaagaacaaatgaaaatgatgacattttttagttcagatacgtagctccactaaatgttctaactgccttccccaaaattggtccttgttttagaaaatcaagtggtccactgatttagaaggcagaagggaaggagcagactttgggggaataatgagatttcctatatcactaatactgttgatttacccaatgtgcaaacgatccagaatgtgagatggaatgtacttgggactgatgcggctgttagaagttagtacttaaacattccatttcaaatattctcattaagggtaatagcagaaaattgcagcagagattaagcagtttttaagtggtaatcccctctgtagaactgttgatttgtttagttaatgctaatttatttaatatacttctactttttgttgatttttaggtctgttgccacagttattgggagttgccccagagaaggccataaaacttacagtaagtcttttgagttggtgcttcttattaagggattttgtacatactcaagaatctagcaggtattcttataggaaacagcaggtttgttttctcagaggtgctagctaatttgaaagcaggggaactcaccacacacattttttcattattctccatttagcagtggacatccaaaaatgtgataataaacttgaggacttttggtggttgctgccatcattgttgtcatcacagcagtagcagctaaattcccttcagtatctaccatattaggcacatgacgtatattacgttttactggtttaatctcaagcaaagcatgatccacagtttacggataaggaaactgaggcctatcgggcttaagtagcatacctgtgttcacacaaatcatgagtgggagaactagaatttaaaatcacacttgtctgactccagagcatgtctttctattacacctgctgtttttataggattcatggttagggtgtgttctataaagccaaatgtgcagggatctgggttctagttgaagttgatcctttatcagattatttgcccagtgcttggctcacatttgacagatggttgatattcagtttaagcgtttgtggaatatacaaatatttgcatcactaaggccacaaagccccagaaagtaaaactctagctttaggttgggctgcgtagctttggagcctgaaattcttcttttaccattttgttatgtgaccttgagatagctaatcttctctggcctatgtctgccaaaaagatatgactgtttcttaaaatttcttgtactacataccattttgagaatattatattaattaattaatgtaatttatgttctttgagaatccttgaggaatttttagatattgaatttcttctaagctgaaaaagtctgctcagccaaatttatctccatgatgagtactgttttagattaattcttgttagaagacttgaaagtgatttttaatcaagccttataaaacagttttaagttgtaagatgtatgtttttattttgtcactattgtcagtgtgtctcccttcttaagctattctaattgcagaacatatttttggctttcatttatcttttaacttttctcctgaaacatcagtgatgcatatatatttttcattttttaaaactattatactattaagagtacttctcaaactattttaagatctgttaaattgtgcaatttatgattactccaatagactgatagaaaaaaatagcatatattgacagatgcatatttataagtgtttaatgactttctttatatttttcatcagcttctataaatatttttcttcaaggtgaacgattttgtgagggataaatttatgcacaaagatggttcggtcccacttgcagcagaaattcttgctggaggctgcg

SEQ ID NO: 14075 - DNA, 433 bp, Homo sapiens
aggtagtactgttttaaaatctgtatttaaaattcaaaacacatttcttttctcagtcttgtccttgactttaactaccttcttctttcttctgacctatcttactttcttctgagataatgatattgtttaattttagctgttggagccactgctgtgtatcctatcgatcttgtaaaaactcgaatgcagaaccaacgatcaactggctcttttgtgggagaactcatgtataaaaacagctttgactgttttaagaaagtgctacgctatgaaggcttctttggactgtatagaggtctgttgccacagttattgggagttgccccagagaaggccataaaacttacagtgaacgattttgtgagggataaatttatgcacaaagatggttcggtcccacttgcagcagaaattcttgctggaggctgcg

SEQ ID NO: 14076 - DNA, 1043 bp, Homo sapiens
ggtatgcctgcagcatctttagtgacccctgctgatgttatcaagacgagattacaggtggctgcccgggctggccaaaccacttacagcggagtgatagactgctttagaaagatactgcgtgaagaaggaccaaaagctctgtggaagggagctggtggtatggaaataatgtgttcttaactaactctttggtatcaggtaaatttttaaaatatctaattatatctgtgatttctccatttttttaaagctcgtgtatttcgatcctcaccccagtttggtgtaactttgctgacttacgaattgctacagcgatggttctacattgattttggaggagtgtaagtatcatgctaaatctgctgctaaattttggctgctgctaatgctctgttgtcgtagggaaaggtacctcagtctagtctctataataaaatagaagagatttagggaaatgttgaaattgtgttaacaaggtcatttccaaggggaacatacaactgatgagaatgtatcaactcctttacattaaatatttgaacaggttttgaatgttatttttatcaagttaaaacaaacaaaaaatacagcttcttactctgttttctcttcttttagaaaacccatgggatcagagccagttcctaaatccaggatcaacctgcctgccccgaatcctgatcacgttgggggctacaaactggcagttgctacatttgcagggattgaaaacaaatttggactttacctacctctcttcaagccatcagtatctacctcaaaggctattggtggaggcccataggaagatcagccctgggatagtgctgtctttttgtgggtactgcagtaaagaacatccctcctgggaatgaagcaatgcttcatcccttttacgtccatctcttgtttaaattcaagtccaggcttttttatcatgtgaaatcattcattttctgggtgttttcttaaccagatcattgtgaaattattcataattattatttggccctctgcccagaaacctttgtttgcatctg

SEQ ID NO: 14077 - DNA, 766 bp, Homo sapiens
ggtatgcctgcagcatctttagtgacccctgctgatgttatcaagacgagattacaggtggctgcccgggctggccaaaccacttacagcggagtgatagactgctttagaaagatactgcgtgaagaaggaccaaaagctctgtggaagggagctggtggtatggaaataatgtgttcttaactaactctttggtatcaggtaaatttttaaaatatctaattatatctgtgatttctccatttttttaaagctcgtgtatttcgatcctcaccccagtttggtgtaactttgctgacttacgaattgctacagcgatggttctacattgattttggaggagtaaaacccatgggatcagagccagttcctaaatccaggatcaacctgcctgccccgaatcctgatcacgttgggggctacaaactggcagttgctacatttgcagggattgaaaacaaatttggactttacctacctctcttcaagccatcagtatctacctcaaaggctattggtggaggcccataggaagatcagccctgggatagtgctgtctttttgtgggtactgcagtaaagaacatccctcctgggaatgaagcaatgcttcatcccttttacgtccatctcttgtttaaattcaagtccaggcttttttatcatgtgaaatcattcattttctgggtgttttcttaaccagatcattgtgaaattattcataattattatttggccctctgcccagaaacctttgtttgcatctg

SEQ ID NO: 14078 - DNA, 1889 bp, Homo sapiens
ctccctgcccacctcctgcagcctcctgcgccccgccgagctggcggatggagctgcgcagcgggagcgtgggcagccaggcggtggcgcggaggatggatggggacagccgagatggcggcggcggcaaggacgccaccgggtcggaggactacgagaacctgccgactagcgcctccgtgtccacccacatgacagcaggagcgatggccgggatcctggagcactcggtcatgtacccggtggactcggtgaagacacgaatgcagagtttgagtccagatcccaaagcccagtacacaagtatctacggagccctcaagaaaatcatgcggaccgaaggcttctggaggcccttgcgaggcgtcaacgtcatgatcatgggtgcagggccggcccatgccatgtattttgcctgctatgaaaacatgaaaaggactttaaatgacgttttccaccaccaaggaaacagccacctagccaacggtattttgaaagcgtttgtctggagttagaaagttctcttcttcaacacgtccctccccagggtgttcctccctgtgacccagccgcctcgacttcggcccgcttgctcacgaataaagaactcagagttgtgtgtgcaatgcacacccagacacacgcacgcacacacacgcgcgcgcacacacatgcttttttctgttcccctccgctttctgaagcctggggagaaatcagtgacagaggtgttttggttttattgttatgtgggttttcttttgtatttttttttgtttgttttgtttttaaacattcaaaagcaattaatgatcagacataggagaaaccctgaatagaaacaaaacttttgaatgctggattcaaaaaaaaaaaaaagttatctggacagcttctttgagactatttaaaaactggtacaacaggtctctacaacgccaagatctaactaagctttaaaagggatagctgggagtatggccaccctgctccacgatgcggtaatgaatccagcagaagtggtgaagcagcgcttgcagatgtacaactcgcagcaccggtcagcaatcagctgcatccggacggtgtggaggaccgaggggttgggggccttctaccggagctacaccacgcagctgaccatgaacatccccttccagtccatccacttcatcacctatgagttcctgcaggagcaggtcaacccccaccggacctacaacccgcagtcccacatcatctcaggcgggctggccggggccctcgccgcggccgccacgacccccctggacgtctgtaagacccttctgaacactcaggagaacgtggccctctcgctggccaacatcagcggccggctgtcgggtatggccaatgccttccggacggtgtaccagctcaacggcctggccggctacttcaaaggcatccaggcgcgtgtcatctaccagatgccctccaccgccatttcttggtctgtctatgagttcttcaagtactttctcaccaagcgccagctggaaaatcgagctccatactaaaggaagggatcatagaatcttttcttaaagtcattctctgcctgcatccagccccttgccctctcctcacacgtagatcattttttttttgcagggtgctgcctatgggccctctgctccccaatgccttagagagaggaggggacggcacggccgctcaccggaaggctgtgtgcggggacatccgaggtggtggtggacaggaaggacttgggaaggggagcgagaaattgctttttctcttcctccctgggcagaatgtagcttttctgcttcactgtggcagcctcctccctggatccttagatcccagaggagggaagaaaatttgcagtgactgaaaacagt

SEQ ID NO: 14079 - DNA, 735 bp, Homo sapiens
ctccctgcccacctcctgcagcctcctgcgccccgccgagctggcggatggagctgcgcagcgggagcgtgggcagccaggcggtggcgcggaggatggatggggacagccgagatggcggcggcggcaaggacgccaccgggtcggaggactacgagaacctgccgactagcgcctccgtgtccacccacatgacagcaggagcgatggccgggatcctggagcactcggtcatgtacccggtggactcggtgaagacacgaatgcagagtttgagtccagatcccaaagcccagtacacaagtatctacggagccctcaagaaaatcatgcggaccgaaggcttctggaggcccttgcgaggcgtcaacgtcatgatcatgggtgcagggccggcccatgccatgtattttgcctgctatgaaaacatgaaaaggactttaaatgacgttttccaccaccaaggaaacagccacctagccaacggttccaggaacttcctgagaacacccgatcgcagagggtaattttctggagtttgttttgcagggatagctgggagtatggccaccctgctccacgatgcggtaatgaatccagcagaagtggtgaagcagcgcttgcagatgtacaactcgcagcaccggtcagcaatcagctgcatccggacggtgtggaggaccgaggggttgggggccttctaccggagctacaccacgcagctgaccatgaaca

SEQ ID NO: 14080 - DNA, 24824 bp, Homo sapiens
attgcctaaggcctggctttagaagcagaacatggagagagaggtttgcagcctgcaggaagctggccagccagacctgccgggcagcgggacccgcgggcagtgcctctgactcacggcacgtccttgatacgcagtgctcccctccccactttctctgccctcctgtggatcacgggtgtcctagggctgttgggagcctggattaaagttgctgagtggccggctgatgatcagatccagggagtcagaccagaggtggggacatcttttcaaaggcaagaagatgctgccagtgcgtgtatatacatatgagggtggaaggggtaaacccagggtgtgtctttaactgaagaatcaagaaagctgctttccttagtcacccgcctctgtggttcgtttgctaaacgttggcttgcgttagcctgattcacagtaatgtggctcccaaggaagattcacatggtatttgtgaaaatgtagcttcatcccctgcccttcattgaatgactgaattacagtcagcaccacataacgatgtttcggtcaactatggactccatatgtgatgagacagtgatcccatagattatagtggagctgaaaaattcctattacctaggggcatcacaacgcattgcatttcgcccgtgtttgggatgatgctggtgtaaacctactatgctgccagtcatgtaaaagtatagcacacacaattagtaggtaatgcttgcaaataataatgaaagactctgctactggtttatgtatttactatgctatactttttgtcattactttagagtgtactcctacttttttttttttttttttgagatggagtttcactcttgtcctgtaggctggagcgaagtggcgcgatctcggcttactgcaacctccacctcctgggttcaagcgattctcctgcctcagcttcccagagtagctgagattacaggcatgcaccgccacgcacggctaattttgtatttttggtagagacagggtttcaccatgttggccaggctggtcaccaactcctgacctcaggtgacccgccctcctcagcctcccagagtgttgggattacaggtgtgagccaccgcccctggccttttttttttttttttttttaagttaattgtaaaagagcctcaggcaggtccttcaggagggattccagaagaaggcattgcgatcacaggaggtgccagctgcattgggacaagatgtggaggtggaagacagtgatattgatgatcctgaccctctgtaagcctaggctaatgtgtatgtttaagaaaaaagtttaaaaagtaaaaaaataaaaaatgttaaaaggaaaagcttatagaataaggatatagagaaaaaatattttttgtagagctgtacaatgtgttttgtgttttaagccaagtgttattacaagagtcaaaaagtcaaaaaattgaaatttataaaacaaaaacattacagtaagctaaatgtaactaattaattttatttatttttttttttagagacagggtcttgccttgtcgcctaggctggagtgcagtgttgagatcatagtttactgcagcctcgaactcctgggtacaaggaatcctccctcctcagcctcctgagtagctgggattacaggtgcgcaccaccacacagctaatttttaaattggtgtagtgaaggagtttcgcaatgttggccaggtggtctcaagctcttggcctcaagcagtcctcctgcctcgacctcccaaagtgctaggattacaggtatgagtcaccacgcccaaccttgaaatttaatttattatggaagaaagcaaaagtttaaaaaataaatttagtgtagcctaagtgtacagtgtttttaaagtctacggtagtgcacaggaatgtcccaggccttcacatttactcaccaccactcacttaaactcacccagagcaacttccagttctgcaggctccattcatggtaaatgccctacacaggtgtaccattaaaaaaaatcttttggctggttgtgatggctcatgcctgtaatcccatctcctggcttcatgccattctccttccccagcttcccgagttgctgggactacaggcgcctgccaccacgcccagctaaattttgtatttttagtagagatggggtttcgctgtgttagccagtatggtctcgatctcctgaccttgttttgatctgcttgcctcggcctcccaagatgctgggattacaggcgtgagccactgcgcccagcaaaaaacgatgtggtattttcactgtactttttttttgttattgagacggagtttcacttttgttgcccaggctggaatgcagtggcagaatctcggctcaccgcaacctctgcctaccgggttcaagcaattctcctgcctcagcctcccgagtagatgggattacaggtgtgtgccaccacgcccggctaattttgtatttttagtagcgatggggtttcaccatgttggccaggctggtctcgaactcccaacctcaagtgatccacctgccctagcctcccaaagtgctgggattacagttgtgagtcaccgcgcccagccttcactgtacttttggtatatttagattcatttagataacaaataccatggtattccagttgcctgcagtattcagtacagtagcatgctgtacaggtttgtagcctaggagcaacacactatagcgtacagcctaggtgtgcggtagctatcccctctcaatttgtgtaagtacactctgtgatgttcacagaaggatgaagtcacctaacaatgcatatctcagaacatatccccgtcatttgcgatgcgtgactgtaattaaggaatggggcctatggggtatgactgtgggtgctgggcactaaggagacggaggcttgacacaacccaggcattccccatgggagcccctctgtggcaggaaggacagatctccaatgaatcattcctttcaggagtgatgagctcagtcttcagggatcctgcacctcacggggaggagttgggaaaggccccccgaggaaggaatatctcagtatctctatctagacctgaaggagatgtggatgttacaactaaactgtatgattctctgtgtccctgagaacatcacagcctatttccaaggtgcctggccatccccagggtgcctgcatgccactgacactctaatctggggttctgctctgagctgagaaagtgtctgtggtttggggtcatcaggtggcagctcttctcctctctgttctgaaatcttaattccctgtttgactgcctggtggctttcagagaagcccagcctcctcccaggtgggaactttcactgtcgaactaaggacccgaggagggtggaaacaggaggaagggaggctaagcggtcacatcagaggcatttctgctcatcgttggctcataataggtggcagtaggggctggtggagcagtggccaggtaagttgctaaaaataaaacatgctcatgtgacgtgtgcaggtttagggtttgcctgagtgagctttcctggtccaggtcacaacttgtagggcaaagagagacttgaggatggtgtaggcgacaactgtgccttccaaaggtcagagatggacctgggatcttgtagtaccagggcctgctctggaggctcagattcgtgtgtcacttcttgtctcttttgaaaggtaactggagagctggacactttcctgtcctctctctttccttgtagccttcctctctcagagatggcctgctatcaaatgccaggggcacagtcagctgggcttggtaaagggcctgagatgagagcttggggactttcccactggagtccatgatagtccagggtgtagacagaagctcttggatctcacagctttggaaaccgagtcctgtttctccaacaggccagtgcggtgacgggcacagacctgctgtcctctctatttgtgtgtccactgattccctggcacagggggtctttgttacaaaatctctttgctgggtgctttgaaggagcacgtgtgtgggcctttttcagggtggttagacaatgccaagctgtcactcagaagaaatggtcaggatagaagcatagaaaatgccctgtggaaatgtagatgagtgttctggctcacacctgtaatcccagctactcaggaggctgaggcagggggattgctggcggacagcagttcgagaccagccttggcaacggagcaagaccctaactctaaaaataaaaataaaaaaataggccgggcgcggtggctcatgcctgtaattccagcactttgtgaggccaagacgggtggatcacgaggtcagaagtttgagaccagcctggccaacatggtgaaaccccgtctcaactaaaaatacaaaaattagctgggtgtggtagcagatgcctataatctcagctacttgagaggctgaggcgggagaatcacttgaacccgggaggcagaggttgcattgagctgagatcatgccattgcactccaggccgggcaacaagagcaagactctgtctcaagaaaaaaaaaaaaattggttttgtgtggtggtgcacacctgtagtcccagctactcaggaggctgaggtgggaagattgcttgagcccaggagtttgaggttgcagtgagccgtgatcatgctactgcactctagcctgggtgacagagcaagatcctgtctctaaaaatattaaaatgaataaataaaagaacagaaaatgacctgtgtggggagaagggttatctgtgaaaggagttagaaacctcaagtgtacataagtaagactggagatctctctgttaatgaaattgtgcttaaaaatttttttttcttgaaccttggcttctcaggcaataactgaattttaaggtgtgtgtgtatatatatatataggtatatatatatataggtgtatatatatatatatatatatagtgtatatatatatatatatatatatatagtgtatatatatatagtgtatgtgtgtgtgtgtgtgtgtatatatatatatatttgggccaggaagggtgaagtgttaaattgccttacttagaaaattaaggtagatttgtatttagcccttagagcttcaaaaatatcagctcagaaatgacttttaattgtgcaggtgataaaatcacaagaaaaaaattcatctacaagttggaatgactcttagctacttatttgtttttaaatttttttttcaaattttggaaggaagtagagaaggagttagaactgtaatttgctattatgggggttggggtgcagtgcgtattagtacaatgttaggtggtggcaggttccgtttatccttggaattagcactgctccccccacaggcttctgggagttgggagcaggctggttggtgacgctttgcctggccttggataagaactcttgttttcaaattcccttgaggtctcttccaagaatcttttgcattttttctgataaatcaatcataaggaagtttctgaaattctctttcagaccctacaacccacaagttactgcaaagctgggcttctaccagaagtgagtgatttgaaattgaaaacagatttcggatctcacctgagtagctcgagtgtaagggagggactgggagagccacagagaacatttgtcaatccagaaccaaccattcatggtgttgcttgactggagggcagggaaggaaaggactagaagcaaggcgaaagcagatctttctgtagatacacacatataagtcttggatttgcattttagggtgaattgtaattagcttgagatgaccaggggcccaccaatcaagcaactctgggaaaaacacttgtctacatcttaagtttctttgtctataaaatgtcaagattgaactaacactacatgattctctcgggaactcaccagttctaaaatttccactccttcttttcacagggcagtgtaactttaactccctgtttcaactttgggtgtaaaatacaggctcacaagcacttttgctttgcagcggaagctaggaagaccctgctgtggaattttgcagaggggctgagcagtggtgggaaggaccagcggcccatgtaccatgttgggcccctgcattccaaggtgtctgcctagaaataaatgatagtttatttaacatacttgtaacttccaacgacaacacttcaagactgcaaatcatccatccgggcaattacagaaatgctgaacggccacagccccgccctggaatcaagggaagaagtgtggcagatgcttctggaaggctctgtttacagctctctgactccttcctgccagaacctttcacaagttcactaccaggaagctgagtcatccaggggtcagccggcatggccaaggtcaccccgcactgccagcagcacagatggggttagcccatcattccagaggagcatccgtgggaatgatggggttggggagctggggagcctccctgcagcatctccctgccatggtgttttgcatttcctgtagatttcgcagtgagaaacggtctcctcttatattcacttcatttcttctctctttctttctttcttttttttgagatggagtctgtctctgtcaccaggctggactgcagtggcgcgatctcggttcactgcaacctctgcctcccgggttcaagcgattctcctgcttcagcctcctgagtagctgggactacaggcatgtgccaccacgcccagctaattttttgtattctcagtagagatgggatttcaccatgttggtcaggatggtctcaatctcctgaccttgtgatccacccgccttggcctcccaaagtgctgggattacaggcgtgagccaccacgtccgggctttttttttttttttttttagacttgttgcccccccaggatggagtgcagtggcgcaatgtcggctcactgtaacctccacctcctgggttcaagcgatgctactgcctcagcctcccaagtagctgggattacaggcatacaccaccacacccggctgattttatagttttagtagacactgggtttctccatgttggtcaggctggtctcaaattcccgacctcaggtgatctgctcacctcagcctcctaaagtgctgggattacaggcatgagtcactgcgcctggccaaaggcaagagatgaggaccatatagatggaaacacagcattaagggtaaaacactctctctctgctctgtctggtgttcagggcccagcatgggctgtatgtcctacacttcgtttcaggctcatcttcaggtgacaccagccttctcggagcctctgtccacatcccacctgtcactacctctgccctaacttcaccttcagtggtcactgccaggacccctccccaaatctaaatgaggtccccctgcatttgccctcattgcaccttctacttttgcttcatggcatttagagtttggaattttttatcgataggatttttagtactctctctctcctctactagactataaactccttgaaggcaaagacgacacctgctccctcagttccagcagcccctaacactgcgctgacatttaggtagtagcagcgttttcttgcagaacgatcctgtagttttaccagctgagacttctgtggtctggggagtcactcatctctggtccctgcctcctcctctcacttttggaaacccttctggccagacggctttggtttaaattgtatgccggagctcttggttccagggagagggttttagcgtaaaaatctcactcatgatggaaggttcctgctattaccttttgcatccaatacaacttaaattgactcctccaaaagcttcggaagtaatttgtacctattgtctagcataaattcagcaagtgggtcccggaggctgaaagtcgagtcttgcggttgtttcctctggtgtttctccctgagacccttagaacggcaagcctggtgcatctggtgtcctgtcatctttctctgtgattgtcatcagtgtgaaaggtgaaaggtgtgtggagaaagaacatcccttcgagctgtggcttagagctgtgacttggcaccacgtggttagtcactatcaagttagaagcctttgtgggaaatctggctttggtaggatctgggaaatttggacccctcatttgccccctggcatctctaaattccagagcccagctttgatggggcttacatccccagctgttaacctgtggggtgggccccagactgtggccaggtgcattgcgctaggggagacagatccacagcaggcagaatttgaggaggacttaaaatacctgctttgggaggccaaggcgggcagatcccctgaggtcgggagtttgagaccagcctgaccaacatggagaaaccctgtctctactaaaaatacaaaattagttgggtgcggtggcacatgcctgtaatcccagctacttgggaggctgaggcaggagaatcgcttgaacccgggaggcggaggttgtggtgagccgagatcaagccactgcactccagcctgggcaacaagagcgaaattccgtttcaaaaaaaaaaaaaaaaaaaacacaaaaaaacaaaaacccgctttgttacctgcctgtgggtggaattgagttcatctctgaatccgtggtagtcatttattgagcacgtgttttagtgagcatggcatggcgctggctccgagatcacagtgctgccgccctccttcacgtttctctgacctttcatgggagtcacatgcagacgcatcacttggtataattatacgtggaggaatgagcaagaggaggctggcgacgggactgctttaaaaatcccttcttctgtggataataggctaatagcggggtgtgctttagaaggtgtggcctccgccaagggcgtgggaactgcatttgtagaagctgggaggaccacacctggcttgggagacggcatgggtttctgaggtgcctggctccctggcctgtccagtgtggacagcttacgcgcagctaggtgaaatgattgtgcagttgctgagggattgggtggcagagctggacagaatttaggtcttctaacttggaacagggctgtgtccatcttacctaggtgtacagtttggggagcactgctgtttggtctagtgagacacacttggtgtaaatatctgtgccctgtagtacccagattccaagggaccagagagcatgcccgcacccacgggctggcgggagcccaggtcctccagggctgctgtggagcatgggcttcttggtgcccagtcctatagctgaacttgggcggcctctggctgttgcccccagggctggtctccctatagttcagaggcgagccagctctcagcagcagggagggccttttccatagtatgaacttggccacaccagaccagtcagcagtgtcgggaatcttggccctcaaggtccctgcctagccctggcctggacttcagcactggtcaaaggtccccagagctgcccttggctctgagcaggtgagtgaacttcccagagcacttttgtctgggcctctgtgccagtgtaaactgataatagtgatttccctgccccacctctctgccagctatctaagttttctttgttacataatcaggattaatttaagcagcctaggccatccatttagaaatggttagtgaagaaaggtgaatggggaggggtcagagtcccttagggggccaccaggtgcgagtccccttgctctttggggccttggtttcccttctgtgagttggggcagctgaagggaagggctgctcaggtggtcctgccacatcccagtgttgtgtctagtgagtacaggtgagagtgctcccaaccagggcagatcctgctgctaggcagtgagtcaggaaggaattggtaaaaatgacgtcattgctaagaatgacgtcttttttgctgtttatccaaaggaaaaaaaaaaaagcagaaataaaagcagcaggcagctgtccaccagaccccatgcaaagggcttttccttgaatcctcacagagactttaggcagtaggtgccattaggagccccacttacagataagaaaacgggggcagagaactgaagtgagtcgcccaaggacacacattgaggaggaagcaacagagctaggatttagatacagaggggtctccaagcctgtccttccagctttgaggtcctgggcctatatattccatcagaaactgaaaggtgtgttggggggtacctagggtcaggatggggttttatttctgtcccttccttgtgatgctgcagggactgtgacctggagttcccaacaccagtgccctgtggctggtagcctcctcctgggactccaggatctattgtttgatttagccattttcttctgtagtccgatgggagggattcaattcaaacctgcaatactgttctttgggccatacaggccatttatcagcaagtagagaaaaacacccacaccttctagcaagattaagctagttctgtggttcttaatgataatttaagccattttgattaacctaggtggtggttttctccctaccaggtagggaatatactggagcctttctaaaaatagttccggtgaagataaacatttattgagtacctactgtactccactaggtgaatacaaggatttctcgttcatctcaggaagcatggttaggggattttacagacgagggaactgaagttcagggaagttaagttacttatccaagttcatatagctgaaaaatagaataggatttcgaccttgtggtaggtggaaaccggggttgtctttgtgctctcaggcatgtggctggcgtggggtagaagctctctatataatggttgagtgactggatgagcttcaaagctggtccctctggcttttcctgctaccccaggccacgtgcccagaaggaacgctgtcttacctgggaggtctttattgactgtttgacgcccttcccatcctatcccaaccccttccccatggcacctagtttccccaaccagaacgtacgttacttatgggcagagacggtctttgagcattgggtgggtggttgaacgcagtttctttgagattctgtgattgggattttcagcaaaatatggtagcaagttggtcagaggggcgagtctggcagtgggggagcccgggcaagtctaactgtttgctcactggcagaacaaagttggggaggttggaggggtaggggaactgaaagcaaaagaaagctcacagggagccccatcgtgcaaaaccgatgatggcagagctgccgggctgcagcgtggagcggggcgggagccttgtgtggagtctgtgaacatactctaggtgcctggatactcctcttatctccccacacatgggttgatgtgcatgtacggtgctttgatgtggactcttgtgttaaatttgttcttctgcgcagctttgtgacgcttcagtgagtgtgtctatatacaaaaggaaaacagttttggctgggtgcagtggctcacgcctgtaatcccagcactttgggaggccgaggtgggtggatcacctgaggtcaggagtttgagaccagcctggacaacatggtgaaacccagtctctaccaaaaaacacaaaaattagccatgtgtggtagcatgcgcctgtaatcccagctactcaggaggctgaggcaggagatggcttgaacccgggggctggaagttgcagtgagccaagttcacgccattgcactccagtctgggcaacagagtgagactccgtctcaaaaaagaaaaaaacaaaaaacaaaaaaaaaaccaacaattttgaggatgaggcatttcttccttacttatgagtgggatgtttatgggccggtgacattgacaaggctggcagagtcaaggggaggccctgggtagtctagcttactagcagtgaattcagttctctcttgaaagcaccgtgactgttggaatatttcagccttagcctttgaatactgacggagtgccaggctttcgtctgtcaagatgcccctctgtgacctcagctggttaatgtctcaagcgcttctttaggagacagaatgggttggtattgaaccaaccactattgcccagtcttgtgatgaccagggttgtggaacagataagttgtgtgacctccacgggtcagggctgttgactttgcctgtaagttacactcttgcagctgggcatagacacagtcctcaggggttttgtggacattaacaagtaaggatttaggtgactctgacatagggtcttccccaaggtcaggcacagaggaggtggcatccatgggacttagcatgttgtagaaacagagcatattgggacaaaagggaagttgaagatcacctgggatcctttagcgtccatccctttgtgagagataggatagcctagttgttaacagcatgactctggccgaccgcctggcttctttctagtcttccttctgtactttgtgaccttgaggcaagtcatttggtctctgtgcctcagtttcccaatttgtggaatggggataactggttgctaatattgctgtttttattgttataattattttgtaaatagaagggttgaaggttcagggaagcaagttgattgacctgaggccatacaatgtatcagtgccagatgcaggatgagaaagaactgtgactcaggccctgtccctcttaccagggcagggcaggacagggaagctgggcaggagagactggcagctcagttccctctccagtccagggtagtcccttccctttctgtctcgcagtgaggtcaccagttgcactcatgaaatcttagtcctgttatctggcatctttggaatttgccccacctgtagggcagagataacttaatcctttttggtgggccacatatgggatattctgggtgtgttctgggtacactgggcatgggccaggcacagacccttccatccattggaggcttttctagagaaggggtggagaccagattgggttcctagggtcgggggatgtgggaatggcaccctctgaactacaggcaaggctgggagctgctgccagtgggcggagagggaaatctaactggtatgtgatgttagtggtggcctggcaagcagctgtagctttggagagagcgaccagcctgtccaggggcctggtagggaaggcttctgttgcacggcctgttgctttctctcagatactggagagcccatctgtcttgcttactgcatggcttttcatagctcccatcatattgctgttgggtgcgattcatagccatggaagacacctgatcataaagtaaattccacacactccagcaaggtattcagggccttgcatggtctagccccaccctacctttcttccagcaaacaataattgatcatctaaggtggcagcttctctcctaagtctgaggctgcttctctaccctcacctgactgctgtcttctctgcacaccagaccttccggccacaggtcctcattccccagatgcaccagcatgttcacatcctcctgcagcgggaattgttttcttcctctccatgccaaatttgtctttttctttcccagtcaaagtaacatatgtacatagtcacaaaatgaaatagtgtagaagagattgtagtgacagctctaattcttacagcttgacatactcttcctttttctaggtggctgttcaaatggcttccttccagccaccttctccaggttggatgtgatctggactctggatctctaccctatagcacatcctgctgtgacctattccaaggagaaggggggtttggtgctggggcttctctcctaggaggctgaggaacttggttattgctatcttagcagaattgttattttctaccaaatgtgcaatgaaaactcttcactgagtcttttgcccctagcaatagcagtgcttcctgaagccccagtagaccctgaaggtttcaggactgtgtctggagagcatcagtgacaggtggcaggaatcctctgtggtccacttcagaggcggcagatgaccaggaggtcagactgtggctggtcttttcagaaggacaaacgtgacccttctgaaaactgggaccattcggggacattggtggaaagacagaggagcctttatggtttgttctcacacatatgaatccactttctcccccctccaacatcagggtgacctgaacgctgaaggaagtctaggccttcctgtaggtgaggcagggaaagccacgtagacctgatttagttgaagtgttttccaccaggtctcaactcttcattttgtcttggtatagcttttctggctgactttctagcaagctggttgggctctttgcttgttccaaaatggtagttttcaccagagacttttcagatgagcaggaagcttttttcagaatgtatgttcttctaactctgcttgagtcccccgccatgtattctgataggcatttgttttcccaccccatcccccacttttttgaagtgggggcaatgactacttttaggggaatcatttttctgttgctggtttcaaaacattaagagcaccaattttttttttttttttgcaacagagtctttctcaggctgaagtgcggtgacatgatcatagctcactgcagcctcagtctcctgggctcaagtgatcctctcaccttagcctcccaagtagctaagaccactggcacccaccatgcctggctaatttttttaaaaaattactttctgaagagatggggtcttgctatgttgtccagactgggcttgaattcctggcagcaagtgatccacctgccttggccttccaaagtgctgggattacaggtgtgagccactgcacccagctcaaattttccttttcattaaaaacatacatatatgtatatgtatgtatatacatatgtatatatgcatgtgtatatatatgtgtgtatatgtatatatgtgtgtatatatgtgtgtgtgtgtatgtatatgtattatatgtatattctctttgtgtatttatttttgccagtttgggagatgttagaaaaagacacgatttggaaacttcaacttagggataaagttagttatactctgagagctgcagttaaaggattatttgtgctgctctgctcttgcctgcgacgtgtgggaatgatgctgagtgatgtcctcctgcttattttgcgtgatttttttttgagacagattctcgctctgtcacccaggctggagtgcaatggtgcgatcttggctcactgcaacctccacctcctgagttcgagcgactctcctgcctcagcctcctgagtagctgggattacaggcgtgtgccactacacctggctaatttttatatttttagtagagatgggattttgccatgttggccaggctggtctcgaacccctgacctcaggtaatctgcccgcctcggcctcccaaagtgctgggattacaggtgtgagccgccacacttggccaattttgcatgatttttacatggcttttcaaagggccagggtgggactatccaaagccctgttaagagtccctcttctgccaaggagcctaggaagggagcaggtttgagtgaggaaggctggtggttttggacggggaacgggtggttttggacgggtagtgccaacggtttttgtgtgcgtggtgctccttgatgtggtctgggtttctgcatttgtagtgtgtgccttctaaggatgctggaaggtgagacagggctttccaaggcctagatggggtttgtggctttacttaggaagacagtcctttccataaagcgtggtgccaaatgcttttcctcctgggcctcctgctgtgatttgtggcgtggagtttcagtgagggagggctctgcaggaaccagctccttggtctgatcctttctggacaattgtggatgggagttggcttcttggtgtcttgagagtgtcctcagcagaccccagtgaagcaggagcatagagctctggatgggctcatggtggacatgggagagctgctggccagggggctgcagggtgaggcttggaaaacagggagggggctgggcttggccccgcattttactgtggtttatttagtgaatgtcagtgctagctggggacagttgacagacaagagaaaacactggtttgattttgaattctgaagcagacattgggcagcagaggctaacatttggcatttatcctaaactttcgaggtgcccgagccttatttcctttctctgggagaaagtctggaacagagacggtgcggagcagcctctagggctcagccctgggcccccctggagttgtgctgctcatggtatcacagtgcttgtttgtttcctgtttgtatccccattgcacctggctcaaggtaggtgtaaggcaaatgctttagaatgagccagtgagtagatttcacatgatcgtctcctcagtcctagaaatgccacgtgaacttcgaacatggaaagttttttatttttgagagattggagaggtgggagttacaggctgtctccaggtcaggcagggagtcagtggctgagtttctgatgctacagatggctggcttgggtggcatgacctctgcaggacccctagaagggcctgaggcccactaccaggctcagcttgcccccttctcttttcttttttggtcctaggcctggatcagaggctccttacccacaggatcttggacaagtcattttccttcttgggcctcagtttcccatctgaaaaggcaggggctgggctggatgtggtctccctagggccattgttgcttctgttacatgatcccgccagctcacctgggacagaacgtgcattttccactctccctcctccccgcagtgagagaacgggccagtgagacaggcctttcctgttttgtcatcttaggggagaattggtgtcaggggctgacccttcactttgttctagctttgctaggagtttgtggagacagtggatgcagatacagacagagttcatatcactgggagtttcactgtcctggagcagatctggagctggaggggacttgctcaggtcacactgggagtggcagtgtcaggccagagacccttgtctcttgattccccgggcaggacacgtttctccatcctgcaggcaggtgcagaggaggaatgcttattcataggcagcacgtgagggctcctctcagctgcttatttggcaccctctttcccctccaggggccagccacacaaccacctgcctccggcctgctccccacacagttgccagaggggtctttctgactctctctgacacctggatgttcttggcacttgctgcttcaagggcataggttcccattggctacggctgtgttttcacacgtgtgtttggtcaggtgtctctggttattaaatgagacaaggcttgcattgctaaagacagaggtttaggaagtgccttggaaaaccaagtgaaacaggtttctttccggaaggatttcccagaggctttagtatggtaatgtgcttatgcatttccaagaggggagaactaaaatgcaaacgtggaaactgattttaccgaacaggaggagactagaagctaggtcttgggcaggaactgaaacctggacaggaaaagaaatttgtgaaattctctgtctccggttgtgtgtgtgtgtgtgcgtgtgtgtgcgcgcgcgcgtgtgtgtgtttatttttaatctctgccctgtctctgcatcctgattcattcatttcctttttcctcctctccaccctcacttccttttcttgtatttttaaaaattgtagtaaaatatacataacaaaatttctcatcttacccatttttaagcatacagtccagcggcattaagtacattcatactattacacaaccatcagtgtcatgcatccacagaactctcctcatcttgcaaaactcaaactcctgtacccataaaacaagaactctccgtcctgttccctcctcaccccagcccctggctacccccattccactttttgtctacaaatttgactactctaggcacctcatatcagtggaatcatacagtatttgtctttttgtgactggctcctttcacttagcatgctgttgtcaagaactatctatgttgtagcctgtgtcagaattttctttccttttttaaggctgaataatattccactgtatggatatattacatcgtgtttatcccttcatctggtgatggacacttgagttgcttccactcactcccagatgttttttcccctctctgatcctcaaggaatagaaaatgcccagccttcatttttacattttacaggtagtggagctttaaaaaagagagtactttgggaggcacagataggagcatcacttgagcccaagagtttgagaccagcctgagcaacatagtaagacccagtctctacaaaaatcagctgggtgtggtggtgcgcacctgtagtctgagctactcaggaggctgaggtgggaggattgcttgagcccaggaggctcaggctgcagtgagctatgatcgtgccactgcactctagcctaggtgataggtgagaccctgtcttaaaaaaataaaaataaaaaataaaaaagagactaaattgattattgtctctctggctgtggccacttctgcctgccttcctagccgcctgccttctgcctctcttgcctctcctgaggctgctgcagggttgatccctccttgcctcttccttacactccttcgaggcaccctggtggttcgtttcctcctcctgttatcatacactttccttgtttttccccattgttttttctcctctgtatcctggtgccaacctcagtgggtgctccctgcaggcaggtggaagaaatgatggtgctgcaggatgaatgaggctctggccccaaacttggctgctgtgactgcagtggtcccagcgggggcctgaccaggcccatctctgcgcttctgggccacttgcctctgtctggggcttgtgtcattaactaagacctgcccttgagtaaaccaccctgaggacagagaagtccactgaggtgcggtgactgaggcagaactcaatcttttagaggtttattctatcagggttgaggatgcaccggggaaaagaaacacaagttatagtaggatctgtgttctgtgctttttccaaagagggctctggtaacgtcagtatttaaaggggaaagagcaagcaggagggagagaagaaaaataaaagaaggaagggtaggcattaggcaagtggtaccattcttgtgaggctctgattagcacttagtgaatctgcattttacatgtgaaaagaagggagttggggaaagtgaatcatggtcttgcactcagtaaatctacgttttacataagataaagtaagcttatgaaattagagctgtctgtttgggaacaaaaagaaggtcagtttttgcatgactcacttcccaagcttaactttctttttctttgacatagtgagtttagggccctgaggttttatttttctttcacagcacaaagatacccagttgacctttttttttcataacagaatgatgcattttggttcagtagtgtttcctccaactgctctacccctaatttaaaaaggggagggggtgagaaatcagtcccaaatgtccctgtaagttttggtgtgatgccagcctccaactggctgacatgagcagttttgtaaaggagagaccctcttgatggcttcacgtatatcatggggtgggatggggacagtcattattgacagccagcctgtgccaagtgtttcccagcagctctctgggcgattattccagccaaggatggccatgccctaaggttaaggaacctgcttgaggtcccagagctggaattgagattgacaacctcaggctgggtggctgtacagcctgggcactctctgtgccccctgccctcactcagccactccctccataggtcaccaggggtaattccctactgcccaggcagagggctggggctggaaggggtctagatggtcacttagtggttccccaagctgagtcctgatcaaaatcatctggggaattttaaaaagaaaaagaagacttgaatcagtgtgtgctagggtggtgtctatggatgggtattttcaaacatttcccgggtaactctgatcttcagcccctgctctgatcctccctttcattttccagtccaggacactggggaccggagagatgagatgccgtgaccaaggtcactgggttgtagccagagccagcatcaggtccaaagtgcgatctcagtagccagttctccatgctctgtgtttgttcagactgccagccctgctcaatggggctctggaacttaaggaaggcctttgaccataggctgggcttgcaaaaccttggtaggaccctgcccttggctggaaacctcagggctccagccagggctcatccccaagaagatacactgccattctccaaagtgtgggggcctctcccctgaagggcgctgcctggagccacctcttgttcacaggcccatgttaggccccctgggacaggttgccttggctccatatgtggttctgcagatcacacccaggcttgagaaatgcggtgacacgtgaactttgcattgatgtgaaaaggtccaaattaaaggtgatggcaagcacagctaagtccaagaaagtgtggctcctatttaggggtggtgggctaagagacaagacacagtaccctttcaccccggtgggtattctaagttgggttagtttgttcatcaattcattcattcaacaaatatttattgggttcccaataaatcatcttactggtccttggagatctgctgtgaacaagacaaacacaaccccacctctgtggcctgcacaaccctggaaggtcacacactagaaccctatcacttggcctctccatgaatcaccgtcatgtagcccctcgacaggggactcttgtgttattactgacaatattgatggttttagacacatattatcccatttaattttcccaaccattctctcaagtggggaaactcaaacttagaaagtttaatgaccttgcccagggtcacaccatgagtgatggcatctgaattcagccccagttctctctgattccaaagctggggttcttgacagccacattgtaccacctggtacccttgctttttgtcaggggcaagtataagaagaaggcaggtgacacgtgaagctttatttgctctaaaacttgagcgatttcatatgtcctaaaggaggagttttgcctcttccttcccagcatgaacacttggcatggtgtgtacatcttcattcgtttggtctggccaacagccactcgggagctgaatgaggtgttgtgaccatgacctgggtattctcttggttcagataccttcttggttggcacattcactttctcgtccttcccttggtctttcttgcttataatatatcccttttttaatttttaattttttttaagacagggttttgttctgtcacccaggctggagtgcagtggcacaaacatagctcactgcagcctcaaactcctgggctcaagggattctcccacctcagcctcccaaatagccaaggctacagaggtgtgccgccatgcctggctaatttcttatttttttgttgaaatgaggtctcagtatattgcccaggttggtctcaaactcctggcctcaagcaatcctcctgtcttggcctcccaaagcgccaggattacaggtgtgagccatcacacctagcctaatgtatcatcttattaaatcagatcaaatcctttttgaaaagacttaaaattgaaatcactttaaaaaacgaaaggatgcagggctaccctccctgggaccctggggcccaggtgtcttggcagctgccttgggctgggccagaagatgtttttgccagtctgtggtaggaaaaagggtgcagagtagcgagtttttaataaagctaaactggccgggtgcagtggctcacgcctgtaatcccagcactttgggaagccgaagcaagtggatctcgaggtcacgagtttgagaccagcctggccaacatagtgaaacccaatctctactaaaaatataaaaaattagctgggcgtggtggagggcgcctgtaatcccagctactcaggaggctgaggcaggagaatcgcttgaacgtggcaggcggaggttgcagcgagccgagattgtgccactgcactccagcctgggcaacagtgtgagactccgtgtcaaagaaaaaaataaaaataaagctaaatctaatttaaagtaccattttataatcagaggtagtcttccttacttttttttaagcattaaaaatgccctttcttttacaaaatcatgtttgtggtggagggcagtggtgattgttgcttatattgttattgtttttgcgtcctttctgggcaaaataaaaagtttgccttggtgtgtccatttcctttgtggttttaatagctggtgaaatctgaactatgaaaatgaccactaattcaggtgattggttttcaccgttcctccaagccctggggtacctggggctctctgtcccggtgagtgagagggagccccagagagtcctttgcccatcttcaatcagagaagccctccttttttatatgtaggattagattttttttatgattttgtttggagataaaaggatacccctgccaaaagttgaaaagcttctcctctaggatgtgtgttgggggggagtgggggagggagggagtcggggagggaggaagggaagggtgggaggaaggaaaggagggaggcaggaaagaaggaagggaggaagaaggaaggagggaatgtagtgactttggtgggactgagccatggtggatcttctacttggcgagtatttcttgcctatatactagtcagagttctccagagaaacaggtaataggatgtgtaaagtctacttgggtttgtaagaccagcctttggttgaagaccttccttgggtcctagcagacagaaaccaggagagacagagacatctatatccggctacatagagaggttatctgtctaactctctgcctgttctctatctatatctgtctgtctgtctgtctgtctacctacctacctgtctctgtctgtctgtctgtctacctacctacctatctaatctacctacctacctacctatctgtctgatctacctacctacgtacctacctacttagaaattgagagatttactttgaggattgacccacatgattgtggggactagccaagtccaaaatctgcaggctggagatttagggagagctgatgttacagtttgagtctgaaggcagtctggaggcagaatttcttccttgagagagacccagtttttttctcacgaggccttcagctgattaaatgaggtgtatgtacccacagtatacaggttaatctactttattcagagtctactgatttaaatgttaaactcatttagaaaatcccttcatacatacatctaaactagtgttagatcaaatatctgggtactgtggctcatccaggctgacccataaaattaaccatcacacctgtgcaagcgcttttccctcctggatggtgtcctagggatgacagaggaggggaaagccaggtctctgcttcaaggagacaaaattatgcatacgaagaaattaagaatgctgctgtgtctgtggagtagccattcttttattcctttactttcttaacaaacttgcttttacttaaaaaaaaaaaaagaaattaagaacaagaccatttatatttaagtgccaacttatgaaatgtaaaaagggatttagaggtgacaaggcaagtgagggctggaggatttggagagatttcatggtgtagggactgaataggagcttccagaacatggaggtttcagataagtgaggacacagaagtcttcacaaccagagtgggcaccacaggacaattctacatctatctaggactctgagtttttgaagggtttccatatgcattgtttggtttgctgcttgcaacaaccctgttgttttaactgaaggtcttagggcctagggattccccagaggccacacaacttgccagtggcaggggaaggtcttactcttccacagccttctctgtctttctccctttatggagcataatgaaatgtacgtgcacacattcatgtagatttcattatgtccatgtagaattcattttgatttcaaatatgtttccttcccagagaaatcctgtgaaactatgacattgtttttctctctctccttctccaggtcttattttccttctttaccatcctgattaactctatttttgtttgttttctcttcttgcccgctcccagacacgaatgcagagtttgagtccagatcccaaagcccagtacacaagtatctacggagccctcaagaaaatcatgcggaccgaaggcttctggaggcccttgcgaggcgtcaacgtcatgatcatgggtgcagggccggcccatgccatgtattttgcctgctatgaaaacatgaaaaggactttaaatgacgttttccaccaccaaggaaacagccacctagccaacggtattttgaaagcgtttgtctggagttagaaagttctcttcttcaacac

SEQ ID NO: 14081 - DNA, 573 bp, Homo sapiens
attgcctaaggcctggctttagaagcagaacatggagagagaggtttgcagcctgcaggaagctggccagccagacctgccgggcagcgggacccgcgggcagtgcctctgactcacggcacgtccttgatacgcagtgctcccctccccactttctctgccctcctgtggatcacgggtgtcctagggctgttgggagcctggattaaagttgctgagtggccggctgatgatcagatccagggagtcagaccagaggtggggacatcttttcaaaggcaagaagatgctgccaacacgaatgcagagtttgagtccagatcccaaagcccagtacacaagtatctacggagccctcaagaaaatcatgcggaccgaaggcttctggaggcccttgcgaggcgtcaacgtcatgatcatgggtgcagggccggcccatgccatgtattttgcctgctatgaaaacatgaaaaggactttaaatgacgttttccaccaccaaggaaacagccacctagccaacggtattttgaaagcgtttgtctggagttagaaagttctcttcttcaacac

SEQ ID NO: 14082 - DNA, 3404 bp, Homo sapiens
cctcctgcagcctcctgcgccccgccgagctggcggatggagctgcgcagcgggagcgtgggcagccaggcggtggcgcggaggatggatggggacagccgagatggcggcggcggcaaggacgccaccgggtcggaggactacgagaacctgccgactagcgcctccgtgtccacccacatgacagcaggagcgatggccgggatcctggagcactcggtcatgtacccggtggactcggtgaagacacgaatgcagagtttgagtccagatcccaaagcccagtacacaagtatctacggagccctcaagaaaatcatgcggaccgaaggcttctggaggcccttgcgaggcgtcaacgtcatgatcatgggtgcagggccggcccatgccatgtattttgcctgctatgaaaacatgaaaaggactttaaatgacgttttccaccaccaaggaaacagccacctagccaacggtattttgaaagcgtttgtctggagttagaaagttctcttcttcaacacgtccctccccagggtgttcctccctgtgacccagccgcctcgacttcggcccgcttgctcacgaataaagaactcagagttgtgtgtgcaatgcacacccagacacacgcacgcacacacacgcgcgcgcacacacatgcttttttctgttcccctccgctttctgaagcctggggagaaatcagtgacagaggtgttttggttttattgttatgtgggttttcttttgtatttttttttgtttgttttgtttttaaacattcaaaagcaattaatgatcagacataggagaaaccctgaatagaaacaaaacttttgaatgctggattcaaaaaaaaaaaaaagttatctggacagcttctttgagactatttaaaaactggtacaacaggtctctacaacgccaagatctaactaagctttaaaaggtcaagaagttttatggctgacaaaggactcgcgcaacgcagaaggcctttcccaccttaagcttccggggatctgggaattttacccccattctcttctgtttgtctgagtctcatctctctgcaagcaagggctgaaatcattttgtttggttgttttgagggagagaggcggggtgggggggtgcaaatctgccagcagctcttacgtaaggcatgttttattggggagggctgagcttttattttctcctctccagtggggttggcttttattgtttcttgtttgggtttggaatggaaatatggatagcagcataaagtacttttattttgacaaaattcatttttttcaacaatggagacatagatttgacccacaataacttctccccctctctttttactctgctcaaaaagcatctctcctcccattacccaaccttggtcataagtgtgcctggctggtttgcagatatttgttctgctttgtaaaaattggccattagtgcatttattgagatgatctctaaagagctatgccctgacctacccctgattctatgacattggggcccttcttttgctgaaactgccttacgtaatggttttactccttgaaagagatttgacggaatccattttatgccaagtgctgccctgcactgtttctgcaatatgtggtgtatgctgtggtgatcttgctgggaatgattataagtgtgtgtgtggtgggggagtgggtattacatgcattgctgaagagtcatcctggtgttcctcattcctcccaccttcccgtggtcattttaattacggggcagtgtcaccgcaaagggaggaaactcaaagccgaaagcaaaattccaggcctgattctggcttttgaggttcctggttcttgaagccaggcctgacccgactctcagatggggtcagtcccgtcgctttgcagactgaccctggaaatctacaaaatgcagattttcctgatttcctcttctcttgcccagttttttttttttttttttttttttttttttaaagcctggattgtaaccagattttcttttttcccccttctcagctgtagatatgatatctcctttcagggccccagcttaagggcaaagtgagttaatgtgtagacaaaggcgagggacaagagagagttaacatctagacagtggaaaaagccatggtgtgtggtttctgggaaccaccaacacttgcaggtttagctttttcccagggttgactacaagaaagaaaaccatgtttttgcaagattaaaatgtggttgagtgtgcctaaattaaccatccccatttttatcatatttccaccatcacttcagggttttaagagtcagtgctcacctgggcggagctggtagtacattttgcttcttagaaagctaagtcctgggttccgtctgattttaggttccaggaacttcctgagaacacccgatcgcagagggtaattttctggagtttgttttgcagggatagctgggagtatggccaccctgctccacgatgcggtaatgaatccagcagaagtggtgaagcagcgcttgcagatgtacaactcgcagcaccggtcagcaatcagctgcatccggacggtgtggaggaccgaggggttgggggccttctaccggagctacaccacgcagctgaccatgaacatccccttccagtccatccacttcatcacctatgagttcctgcaggagcaggtcaacccccaccggacctacaacccgcagtcccacatcatctcaggcgggctggccggggccctcgccgcggccgccacgacccccctggacgtctgtaagacccttctgaacactcaggagaacgtggccctctcgctggccaacatcagcggccggctgtcgggtatggccaatgccttccggacggtgtaccagctcaacggcctggccggctacttcaaaggcatccaggcgcgtgtcatctaccagatgccctccaccgccatttcttggtctgtctatgagttcttcaagtactttctcaccaagcgccagctggaaaatcgagctccatactaaaggaagggatcatagaatcttttcttaaagtcattctctgcctgcatccagccccttgccctctcctcacacgtagatcattttttttttgcagggtgctgcctatgggccctctgctccccaatgccttagagagaggaggggacggcacggccgctcaccggaaggctgtgtgcggggacatccgaggtggtggtggacaggaaggacttgggaaggggagcgagaaattgctttttctcttcctccctgggcagaatgtagcttttctgcttcactgtggcagcctcctccctggatccttagatcccagaggagggaagaaaatttgcagtgactgaaaacagtaaaaaaaaaaaaaaaaaa

SEQ ID NO: 14083 - DNA, 2951 bp, Homo sapiens
agcctcctgcgccccgccgagctggcggatggagctgcgcagcgggagcgtgggcagccaggcggtggcgcggaggatggatggggacagccgagatggcggcggcggcaaggacgccaccgggtcggaggactacgagaacctgccgactagcgcctccgtgtccacccacatgacagcaggagcgatggccgggatcctggagcactcggtcatgtacccggtggactcggtgaaggtgaggcgcggggagacttcggggacgcaacgagcggagaaggagcgcgcgcgcgcatttgcatcccgcgcgccggcagcctcggggcagcgtcccgaaaccgagctctccccaggaccgcggctggccggggtcgccccaggagcagctgcgcgcagcctgggcgccgcgccttccgccgaccccgcgagggtgcccggtcctcgccccgcaccgcccgctgctccagccgcgtgcccggccccggctgctggcggcgctgaggcgggggaggcggagtggcgagcaccgctggcttcggcggcgactgggctcccgggggacgcgatcgctgaagctctgcacagtcttaccacgctggccgttcgggctggctggggccgcccacacgtgcgcggtttccgagggagctccccgcaggggaagccctcaccacgctggagctgagaaacgtgtggccctggcccggccgcgcgccctcgggacttggtgtgtggctgctgctccccgggttatttcgggaacttggggccggcaagtcttctctcgactagtggcagctctttaccggttcgacagcggcccgtgggatcccctttctgagggttcctgcacttcttcccccgactttgggtcgccgagccgccgggaggcaatgacgtttgccttctccttttgcttgcggggaggtgggtgggcttgtgccttacagcccttgctgtggattgtgtgagaggcactcagtttcctttaaaccctgtctgtcacttgccccggtagttttaactgcatttctgtaaagaggcagcgttactaggtgcgttttgcctggtagactgagacctgccctctgtcagcctgcccagaacaccccagggccaggatagagtagtgcaggaagtaatgccagtattgactgttacacgttgcacttttataggcataactcgcctaattcatgcaacagccctgggggttaacagatgaagaaactgaggcgcagagaggcgaaccgattaccttgcccaggctcctacaccacctcctatcctctggctgcagctgcagtgtgctttggaggattcggaggcctctctaggtggcaattattttgcaaggcaggtcccacagaggcacccccagcagctttatcttgttgctgatgctggtcctgcatgagcaggtatgaaggccagaaagtataactcagagggttttcccggctccggggagctcgcttggagccagcagtcagtgtctggacaggcagaagtccagtgaggaaagacatgggcttccaaggtgctgctggacctaagcctgagccatcacccatatgtccctccagtgtcccagtggggagttagaggaatggttctcatctccaggaaagacactggactgataccaggtggcatttgtatgggaaagaatccctcaaatgtaataaaattctccatgattgaagctgttgtctcaactgccctgggcagagtctggggaaagttaggagcagggaggtgttatctgagcaggccctagtcctactggtgtcttgagatgaatgttctattcgggaaccccacagtgagttcactttagagcatcattttagcttatttttaggattagaaataattagttgtgccttctgagcaccctttgacactctcaagaggcgtttctcacacgtttaaattgtgtgatctgtgtttagtttctccctgccccatacatgttgatatgttttggttcagatgtcacctgtatacttagtattactttccatagcagttttcacctgtggacaggttaacatggtgtgaatggtagaaggagccggtctggttttcctagacaagtctgtaaaacaaggcgtgggttagctaatcagtgaagtcttctaggttctgggattataactgacccttaggggcccttccatgctgaagtgtgcagggttggttttgaggctgccactgagtgccaaggtctgccaacatcagcacagttgtctgccaagcatgaggagtcaggggtgcatcctccatcatggaaaggcttgggggagaccacacctgtgttcctcttaagtattttggatgatggcgaagaccgggagtaactgagtcaagaaacccgggttgggcttcaagccctgctctcacttgcttcatgcctcgggcactgttctgtgccttagttttgtcactataaagtggggacagtggacctgctcagtccctctccacatttttaacccatgcctcgtttctctgaacacacaacacccatcgtcctcttttatgttacttgaaatatcaaaagaattattacagctgaaaacaaatctatgtaaatcggatcttgaaagagagaaagctttctccagttttgaaaggcgccatttttaactttgatcttgtaatgacaaataagaatgttgaatcggctggcttttttctatcctaggtaatgtggactgtggagctctgtgctggtcactttcaaccctgaacctgatgctacttattttgcagttctaagtgcaaagtcggcctggtggatgcttcccattataatattaaatttgcttcttcgtgaggtcacacctcacatccccagtgtcactttaataactagtgttttttacatggtgggccatgacccattagtggactctgcatttaaaaataaataaataaataaaaga

SEQ ID NO: 14084 - DNA, 479 bp, Homo sapiens
agcctcctgcgccccgccgagctggcggatggagctgcgcagcgggagcgtgggcagccaggcggtggcgcggaggatggatggggacagccgagatggcggcggcggcaaggacgccaccgggtcggaggactacgagaacctgccgactagcgcctccgtgtccacccacatgacagcaggagcgatggccgggatcctggagcactcggtcatgtacccggtggactcggtgaaggtaatgtggactgtggagctctgtgctggtcactttcaaccctgaacctgatgctacttattttgcagttctaagtgcaaagtcggcctggtggatgcttcccattataatattaaatttgcttcttcgtgaggtcacacctcacatccccagtgtcactttaataactagtgttttttacatggtgggccatgacccattagtggactctgcatttaaaaataaataaataaataaaaga

SEQ ID NO: 14085 - DNA, 4672 bp, Homo sapiens
ctccctgcccacctcctgcagcctcctgcgccccgccgagctggcggatggagctgcgcagcgggagcgtgggcagccaggcggtggcgcggaggatggatggggacagccgagatggcggcggcggcaaggacgccaccgggtcggaggactacgagaacctgccgactagcgcctccgtgtccacccacatgacagcaggagcgatggccgggatcctggagcactcggtcatgtacccggtggactcggtgaagacacgaatgcagagtttgagtccagatcccaaagcccagtacacaagtatctacggagccctcaagaaaatcatgcggaccgaaggcttctggaggcccttgcgaggcgtcaacgtcatgatcatgggtgcagggccggcccatgccatgtattttgcctgctatgaaaacatgaaaaggactttaaatgacgttttccaccaccaaggaaacagccacctagccaacgggatagctgggagtatggccaccctgctccacgatgcggtaatgaatccagcagaagtggtgaagcagcgcttgcagatgtacaactcgcagcaccggtcagcaatcagctgcatccggacggtgtggaggaccgaggggttgggggccttctaccggagctacaccacgcagctgaccatgaacatccccttccagtccatccacttcatcacctatgagttcctgcaggagcaggtcaacccccaccggacctacaacccgcagtcccacatcatctcaggcgggctggccggggccctcgccgcggccgccacgacccccctggacgtctgtaagacccttctgaacactcaggagaacgtggccctctcgctggccaacatcagcggccggctgtcgggtatggccaatgccttccggacggtgtaccagctcaacggcctggccggctacttcaaaggcatccaggcgcgtgtcatctaccagatgccctccaccgccatttcttggtctgtctatgagttcttcaagtactttctcaccaagcgccagctggaaaatcgagctccatactaaaggaagggatcatagaatcttttcttaaagtcattctctgcctgcatccagccccttgccctctcctcacacgtagatcattttttttttgcagggtgctgcctatgggccctctgctccccaatgccttagagagaggaggggacggcacggccgctcaccggaaggctgtgtgcggggacatccgaggtggtggtggacaggaaggacttgggaaggggagcgagaaattgctttttctcttcctccctgggcagaatgtagcttttctgcttcactgtggcagcctcctccctggatccttagatcccagaggagggaagaaaatttgcagtgactgaaaacagtaaaaaaaaaaaaaaaaaaaaaaaaaaaaaaaaaaaaaaaaaaaaatttatgtatataaaagttgcattacacagtacaaaatagatggataatgtttatcctttatttttctatgtagaagtttttgaatttgtgtgtgtgcttgtgcgtgtctacacctagtattacggctgggactctccagctgtttttgttgttgttatgtttttaagagggttgaattcttccatcaggtgaacgaaaaaggcaacaaagtaataaatcagtgaatgtggccggcagctgtgtttagcccctccagatggaagtttcacttgaatgtaaaataataaagtttatattttgaatttctcttttcatgggggaaaaaaggtacgttaaaaaaatcaaaataatgatatgtcacttgcagctacctttttttttcttttaaattcaatcagccaccttcatgtgcctttttcctttgtctttccccaaaattccaggaccagagatctggccctggcctattttctcttgctgtgtacacacacgcacacatgctgggtggcaggatctcgcccgctggagggtggtggagcccagtagaattggggtgactgggcataaacctgctgagactgcttccttccctggttgtgagtgatgtgaatgcctgccttccccggtcagcacttagaagcccttgataggcagcatttggcgacttgtggggcaggtgtttgggataaatcctaccttcatcctaggacttatttctgcatcagccttttaactcaggcacttcaggtaacgtgatctatgtgtgttttgactgaatctcatctcctgtgtttccctgtgcagtctagggaagcatgtctccagtctttgtccctgtcttgtcccaaccattaattctcatgtcacagcttctcactgcatgtgacaagagccaggcctatctgctagggccctgcggctgaggtctgacctggaccctcatgcccgagtcggaagacccctctccagaagccattctgcatccttgtctgctctgcgtcacccgagaacacaggcttcgcagcctcgctttctgaaatggtgtgtgccgagtcagattgccgctcagagaaaatacaagcccgttttccctagctgtgccatttggtgctctgccaggctgccgtgcaagggaataccgacgagacgagctgcactgtctctgatttggagccctcaccggagcttgtctttaaaaatgagcaggaagctcatgtatgtttgcatttcagtgagccgggtcctgacctgccgccacccatcacggtcagcgtggtgcatcttaccgaggaggcgcaggcctggattcttttgagtggtgctactgcctaggaagtaacacgtggagaatttccatcttgggaccatgcacacagtgccttggggagtagattttgccctaatagcgatgaagaattttatcagtcagtggagttcctttttcagatcagggatgggaaagagccaaactgggtacctcccacgtgtgccccgtgaacagccctttgcagctgggctgtggggcttggctgctgccctgtcccatctggcagttaacgccttctccctgctctgccccccactccccaaaaccagttgcagcctcaacccacatggggatgtagaaagccgtaaagtccacgctactgttgaaaatgtttacatctccgctctcaacctgccttgggttcgtgttaaatggtgttaaattctgcaaatggaggggaaaaaaatcaaattctaaatttcaaagtagaatttaaagcaaatttgtaaaaaaattatcctaccaccccttttggtccacttaagatatgccacgctgaagcaaggtatttcctactggattttgctttcactggtgtttagaaaataaacttgatttctctaggagcactcctttggttagagggatgcaagaaggagaggtgaaggtggcgtgtggtggctcatgcctgtaatcccagcactttggggaggccgaggcaggcggatcacttgaggccagcagtttgagaccagcctggccaacatgatgaaaccccatctctactaaaaatacaaaaaattagctgggcatggtggcaggcacctgtaatcccagttacttgggaggctgaggcaggagaattgcttgaacccaggaggtggaggttgcagtgagctgagattgtgccactgcacttcagcctgggcgacagagtgactctgtcaaaaaggaaaggcaaaaaccggaccctggagctctgtgggccctgattgcaggcccctccctgtgtgatgagggatgagtcagcttggggagccacttggccagcctgcatgcctggtcatcaggaggttgagaaaagccttgaaagttgtgaagcactgagcagatacaagtgtttgttaattttgtagaaattaactttcccatctggcctttatctccaaagttggtattgttgctccacgcagactgcagtccggtttcttattgtgactttgacaatgcaaagtgcaaaataggaagaggcctccccaccccactatcccaccctggtgaccaattcagtgtaacctttgcacgtactcagtcattggtgtctttggagtgacatctgcagccagttagtgccacctgagtacagcactcgtacttttacatgatgtgtgtgtgagtagctcttctgtccaaaccatgatttgaggttcaactacctgtagatcaaagctttattttagaacgataaactgattttttccaaatgggtgaaatcttctccccatgactatgttttcttaactttgcattgaatctatttactgggttacattctatgtgtagtttgctttcttcatttttttttcttttaaaatgctcatgtcttattccaagcaccttcctccaaagtccccataaagctgcatctccaacacattgttatgccaataaggttttatttaactttatttaaggatgattgtgtctttgaatgacaaatgtactgctgcttcctacctgcaagacgaacaatgtatgtttcaagggtgagcaagtgttatttcttaaatttctcaaatgcctgtagtaactattgtttctgcctctcaattgttgccagctctttgaagaaggggagaattgtgtgtttttgtgtggggatgtttctgatatgctgctacagttgcaaaacactggagctagagaaaataaagtactgatcttcgaa

SEQ ID NO: 14086 - DNA, 3018 bp, Homo sapiens
ggatggggacagccgagatggcggcggcggcaaggacgccaccgggtcggaggactacgagaacctgccgactagcgcctccgtgtccacccacatgacagcaggagcgatggccgggatcctggagcactcggtcatgtacccggtggactcggtgaagacacgaatgcagagtttgagtccagatcccaaagcccagtacacaagtatctacggagccctcaagaaaatcatgcggaccgaaggcttctggaggcccttgcgaggcgtcaacgtcatgatcatgggtgcagggccggcccatgccatgtattttgcctgctatgaaaacatgaaaaggactttaaatgacgttttccaccaccaaggaaacagccacctagccaacggtattttgaaagcgtttgtctggagttagaaagttctcttcttcaacacgtccctccccagggtgttcctccctgtgacccagccgcctcgacttcggcccgcttgctcacgaataaagaactcagagttgtgtgtgcaatgcacacccagacacacgcacgcacacacacgcgcgcgcacacacatgcttttttctgttcccctccgctttctgaagcctggggagaaatcagtgacagaggtgttttggttttattgttatgtgggttttcttttgtatttttttttgtttgttttgtttttaaacattcaaaagcaattaatgatcagacataggagaaaccctgaatagaaacaaaacttttgaatgctggattcaaaaaaaaaaaaaagttatctggacagcttctttgagactatttaaaaactggtacaacaggtctctacaacgccaagatctaactaagctttaaaaggtcaagaagttttatggctgacaaaggactcgcgcaacgcagaaggcctttcccaccttaagcttccggggatctgggaattttacccccattctcttctgtttgtctgagtctcatctctctgcaagcaagggctgaaatcattttgtttggttgttttgagggagagaggcggggtgggggggtgcaaatctgccagcagctcttacgtaaggcatgttttattggggagggctgagcttttattttctcctctccagtggggttggcttttattgtttcttgtttgggtttggaatggaaatatggatagcagcataaagtacttttattttgacaaaattcatttttttcaacaatggagacatagatttgacccacaataacttctccccctctctttttactctgctcaaaaagcatctctcctcccattacccaaccttggtcataagtgtgcctggctggtttgcagatatttgttctgctttgtaaaaattggccattagtgcatttattgagatgatctctaaagagctatgccctgacctacccctgattctatgacattggggcccttcttttgctgaaactgccttacgtaatggttttactccttgaaagagatttgacggaatccattttatgccaagtgctgccctgcactgtttctgcaatatgtggtgtatgctgtggtgatcttgctgggaatgattataagtgtgtgtgtggtgggggagtgggtattacatgcattgctgaagagtcatcctggtgttcctcattcctcccaccttcccgtggtcattttaattacggggcagtgtcaccgcaaagggaggaaactcaaagccgaaagcaaaattccaggcctgattctggcttttgaggttcctggttcttgaagccaggcctgacccgactctcagatggggtcagtcccgtcgctttgcagactgaccctggaaatctacaaaatgcagattttcctgatttcctcttctcttgcccagttttttttttttttttttttttttttttttaaagcctggattgtaaccagattttcttttttcccccttctcagctgtagatatgatatctcctttcagggccccagcttaagggcaaagtgagttaatgtgtagacaaaggcgagggacaagagagagttaacatctagacagtggaaaaagccatggtgtgtggtttctgggaaccaccaacacttgcaggtttagctttttcccagggttgactacaagaaagaaaaccatgtttttgcaagattaaaatgtggttgagtgtgcctaaattaaccatccccatttttatcatatttccaccatcacttcagggttttaagagtcagtgctcacctgggcggagctggtagtacattttgcttcttagaaagctaagtcctgggttccgtctgattttaggttccaggaacttcctgagaacacccgatcgcagagggtaattttctggagtttgttttgcagggatagctgggagtatggccaccctgctccacgatgcggtaatgaatccagcagaaggtaatgtttcatggtcccagggaggggcagtaggggatgtgcaaaggggcacaaaaaatggttgtgggagagtggagaggactgaaggtgggcagagcggctcctagtctccagtcagagcagacaggagaattgaattttttactacgttatcaaaggcctcaagaaaggacgtgaacataagagtttttggtattcctgtgctcggagctactcaaagtgtgttctacagaccagcagcatcagacatcttgaggggtgttggaaatgctaattctgaggctgggtgcagtggctcatgcctgtaatcccagcattttttgggaggccgaggtgggcagatcacttgaggtcaggagttcgagaccagcctggccaacatggagagacccccatctctactaaaaatacaaaaattagcctagtgtggtgtgtgcacctgtaatcccagctactggggtggccgaggtgggagaatcgcttgaacccagcaggcagaggttgcagtgcaccgagagtacgccactgtactccagcctgggccacagagccagactccatctcaaaaggaaaaaaaaaaaaaaaaa

SEQ ID NO: 14087 - DNA, 24692 bp, Homo sapiens
cttgatacgcagtgctcccctccccactttctctgccctcctgtggatcacgggtgtcctagggctgttgggagcctggattaaagttgctgagtggccggctgatgatcagatccagggagtcagaccagaggtggggacatcttttcaaaggcaagaagatgctgccagtgcgtgtatatacatatgagggtggaaggggtaaacccagggtgtgtctttaactgaagaatcaagaaagctgctttccttagtcacccgcctctgtggttcgtttgctaaacgttggcttgcgttagcctgattcacagtaatgtggctcccaaggaagattcacatggtatttgtgaaaatgtagcttcatcccctgcccttcattgaatgactgaattacagtcagcaccacataacgatgtttcggtcaactatggactccatatgtgatgagacagtgatcccatagattatagtggagctgaaaaattcctattacctaggggcatcacaacgcattgcatttcgcccgtgtttgggatgatgctggtgtaaacctactatgctgccagtcatgtaaaagtatagcacacacaattagtaggtaatgcttgcaaataataatgaaagactctgctactggtttatgtatttactatgctatactttttgtcattactttagagtgtactcctacttttttttttttttttttgagatggagtttcactcttgtcctgtaggctggagcgaagtggcgcgatctcggcttactgcaacctccacctcctgggttcaagcgattctcctgcctcagcttcccagagtagctgagattacaggcatgcaccgccacgcacggctaattttgtatttttggtagagacagggtttcaccatgttggccaggctggtcaccaactcctgacctcaggtgacccgccctcctcagcctcccagagtgttgggattacaggtgtgagccaccgcccctggccttttttttttttttttttttaagttaattgtaaaagagcctcaggcaggtccttcaggagggattccagaagaaggcattgcgatcacaggaggtgccagctgcattgggacaagatgtggaggtggaagacagtgatattgatgatcctgaccctctgtaagcctaggctaatgtgtatgtttaagaaaaaagtttaaaaagtaaaaaaataaaaaatgttaaaaggaaaagcttatagaataaggatatagagaaaaaatattttttgtagagctgtacaatgtgttttgtgttttaagccaagtgttattacaagagtcaaaaagtcaaaaaattgaaatttataaaacaaaaacattacagtaagctaaatgtaactaattaattttatttatttttttttttagagacagggtcttgccttgtcgcctaggctggagtgcagtgttgagatcatagtttactgcagcctcgaactcctgggtacaaggaatcctccctcctcagcctcctgagtagctgggattacaggtgcgcaccaccacacagctaatttttaaattggtgtagtgaaggagtttcgcaatgttggccaggtggtctcaagctcttggcctcaagcagtcctcctgcctcgacctcccaaagtgctaggattacaggtatgagtcaccacgcccaaccttgaaatttaatttattatggaagaaagcaaaagtttaaaaaataaatttagtgtagcctaagtgtacagtgtttttaaagtctacggtagtgcacaggaatgtcccaggccttcacatttactcaccaccactcacttaaactcacccagagcaacttccagttctgcaggctccattcatggtaaatgccctacacaggtgtaccattaaaaaaaatcttttggctggttgtgatggctcatgcctgtaatcccatctcctggcttcatgccattctccttccccagcttcccgagttgctgggactacaggcgcctgccaccacgcccagctaaattttgtatttttagtagagatggggtttcgctgtgttagccagtatggtctcgatctcctgaccttgttttgatctgcttgcctcggcctcccaagatgctgggattacaggcgtgagccactgcgcccagcaaaaaacgatgtggtattttcactgtactttttttttgttattgagacggagtttcacttttgttgcccaggctggaatgcagtggcagaatctcggctcaccgcaacctctgcctaccgggttcaagcaattctcctgcctcagcctcccgagtagatgggattacaggtgtgtgccaccacgcccggctaattttgtatttttagtagcgatggggtttcaccatgttggccaggctggtctcgaactcccaacctcaagtgatccacctgccctagcctcccaaagtgctgggattacagttgtgagtcaccgcgcccagccttcactgtacttttggtatatttagattcatttagataacaaataccatggtattccagttgcctgcagtattcagtacagtagcatgctgtacaggtttgtagcctaggagcaacacactatagcgtacagcctaggtgtgcggtagctatcccctctcaatttgtgtaagtacactctgtgatgttcacagaaggatgaagtcacctaacaatgcatatctcagaacatatccccgtcatttgcgatgcgtgactgtaattaaggaatggggcctatggggtatgactgtgggtgctgggcactaaggagacggaggcttgacacaacccaggcattccccatgggagcccctctgtggcaggaaggacagatctccaatgaatcattcctttcaggagtgatgagctcagtcttcagggatcctgcacctcacggggaggagttgggaaaggccccccgaggaaggaatatctcagtatctctatctagacctgaaggagatgtggatgttacaactaaactgtatgattctctgtgtccctgagaacatcacagcctatttccaaggtgcctggccatccccagggtgcctgcatgccactgacactctaatctggggttctgctctgagctgagaaagtgtctgtggtttggggtcatcaggtggcagctcttctcctctctgttctgaaatcttaattccctgtttgactgcctggtggctttcagagaagcccagcctcctcccaggtgggaactttcactgtcgaactaaggacccgaggagggtggaaacaggaggaagggaggctaagcggtcacatcagaggcatttctgctcatcgttggctcataataggtggcagtaggggctggtggagcagtggccaggtaagttgctaaaaataaaacatgctcatgtgacgtgtgcaggtttagggtttgcctgagtgagctttcctggtccaggtcacaacttgtagggcaaagagagacttgaggatggtgtaggcgacaactgtgccttccaaaggtcagagatggacctgggatcttgtagtaccagggcctgctctggaggctcagattcgtgtgtcacttcttgtctcttttgaaaggtaactggagagctggacactttcctgtcctctctctttccttgtagccttcctctctcagagatggcctgctatcaaatgccaggggcacagtcagctgggcttggtaaagggcctgagatgagagcttggggactttcccactggagtccatgatagtccagggtgtagacagaagctcttggatctcacagctttggaaaccgagtcctgtttctccaacaggccagtgcggtgacgggcacagacctgctgtcctctctatttgtgtgtccactgattccctggcacagggggtctttgttacaaaatctctttgctgggtgctttgaaggagcacgtgtgtgggcctttttcagggtggttagacaatgccaagctgtcactcagaagaaatggtcaggatagaagcatagaaaatgccctgtggaaatgtagatgagtgttctggctcacacctgtaatcccagctactcaggaggctgaggcagggggattgctggcggacagcagttcgagaccagccttggcaacggagcaagaccctaactctaaaaataaaaataaaaaaataggccgggcgcggtggctcatgcctgtaattccagcactttgtgaggccaagacgggtggatcacgaggtcagaagtttgagaccagcctggccaacatggtgaaaccccgtctcaactaaaaatacaaaaattagctgggtgtggtagcagatgcctataatctcagctacttgagaggctgaggcgggagaatcacttgaacccgggaggcagaggttgcattgagctgagatcatgccattgcactccaggccgggcaacaagagcaagactctgtctcaagaaaaaaaaaaaaattggttttgtgtggtggtgcacacctgtagtcccagctactcaggaggctgaggtgggaagattgcttgagcccaggagtttgaggttgcagtgagccgtgatcatgctactgcactctagcctgggtgacagagcaagatcctgtctctaaaaatattaaaatgaataaataaaagaacagaaaatgacctgtgtggggagaagggttatctgtgaaaggagttagaaacctcaagtgtacataagtaagactggagatctctctgttaatgaaattgtgcttaaaaatttttttttcttgaaccttggcttctcaggcaataactgaattttaaggtgtgtgtgtatatatatatataggtatatatatatataggtgtatatatatatatatatatatagtgtatatatatatatatatatatatatagtgtatatatatatagtgtatgtgtgtgtgtgtgtgtgtatatatatatatatttgggccaggaagggtgaagtgttaaattgccttacttagaaaattaaggtagatttgtatttagcccttagagcttcaaaaatatcagctcagaaatgacttttaattgtgcaggtgataaaatcacaagaaaaaaattcatctacaagttggaatgactcttagctacttatttgtttttaaatttttttttcaaattttggaaggaagtagagaaggagttagaactgtaatttgctattatgggggttggggtgcagtgcgtattagtacaatgttaggtggtggcaggttccgtttatccttggaattagcactgctccccccacaggcttctgggagttgggagcaggctggttggtgacgctttgcctggccttggataagaactcttgttttcaaattcccttgaggtctcttccaagaatcttttgcattttttctgataaatcaatcataaggaagtttctgaaattctctttcagaccctacaacccacaagttactgcaaagctgggcttctaccagaagtgagtgatttgaaattgaaaacagatttcggatctcacctgagtagctcgagtgtaagggagggactgggagagccacagagaacatttgtcaatccagaaccaaccattcatggtgttgcttgactggagggcagggaaggaaaggactagaagcaaggcgaaagcagatctttctgtagatacacacatataagtcttggatttgcattttagggtgaattgtaattagcttgagatgaccaggggcccaccaatcaagcaactctgggaaaaacacttgtctacatcttaagtttctttgtctataaaatgtcaagattgaactaacactacatgattctctcgggaactcaccagttctaaaatttccactccttcttttcacagggcagtgtaactttaactccctgtttcaactttgggtgtaaaatacaggctcacaagcacttttgctttgcagcggaagctaggaagaccctgctgtggaattttgcagaggggctgagcagtggtgggaaggaccagcggcccatgtaccatgttgggcccctgcattccaaggtgtctgcctagaaataaatgatagtttatttaacatacttgtaacttccaacgacaacacttcaagactgcaaatcatccatccgggcaattacagaaatgctgaacggccacagccccgccctggaatcaagggaagaagtgtggcagatgcttctggaaggctctgtttacagctctctgactccttcctgccagaacctttcacaagttcactaccaggaagctgagtcatccaggggtcagccggcatggccaaggtcaccccgcactgccagcagcacagatggggttagcccatcattccagaggagcatccgtgggaatgatggggttggggagctggggagcctccctgcagcatctccctgccatggtgttttgcatttcctgtagatttcgcagtgagaaacggtctcctcttatattcacttcatttcttctctctttctttctttcttttttttgagatggagtctgtctctgtcaccaggctggactgcagtggcgcgatctcggttcactgcaacctctgcctcccgggttcaagcgattctcctgcttcagcctcctgagtagctgggactacaggcatgtgccaccacgcccagctaattttttgtattctcagtagagatgggatttcaccatgttggtcaggatggtctcaatctcctgaccttgtgatccacccgccttggcctcccaaagtgctgggattacaggcgtgagccaccacgtccgggctttttttttttttttttttagacttgttgcccccccaggatggagtgcagtggcgcaatgtcggctcactgtaacctccacctcctgggttcaagcgatgctactgcctcagcctcccaagtagctgggattacaggcatacaccaccacacccggctgattttatagttttagtagacactgggtttctccatgttggtcaggctggtctcaaattcccgacctcaggtgatctgctcacctcagcctcctaaagtgctgggattacaggcatgagtcactgcgcctggccaaaggcaagagatgaggaccatatagatggaaacacagcattaagggtaaaacactctctctctgctctgtctggtgttcagggcccagcatgggctgtatgtcctacacttcgtttcaggctcatcttcaggtgacaccagccttctcggagcctctgtccacatcccacctgtcactacctctgccctaacttcaccttcagtggtcactgccaggacccctccccaaatctaaatgaggtccccctgcatttgccctcattgcaccttctacttttgcttcatggcatttagagtttggaattttttatcgataggatttttagtactctctctctcctctactagactataaactccttgaaggcaaagacgacacctgctccctcagttccagcagcccctaacactgcgctgacatttaggtagtagcagcgttttcttgcagaacgatcctgtagttttaccagctgagacttctgtggtctggggagtcactcatctctggtccctgcctcctcctctcacttttggaaacccttctggccagacggctttggtttaaattgtatgccggagctcttggttccagggagagggttttagcgtaaaaatctcactcatgatggaaggttcctgctattaccttttgcatccaatacaacttaaattgactcctccaaaagcttcggaagtaatttgtacctattgtctagcataaattcagcaagtgggtcccggaggctgaaagtcgagtcttgcggttgtttcctctggtgtttctccctgagacccttagaacggcaagcctggtgcatctggtgtcctgtcatctttctctgtgattgtcatcagtgtgaaaggtgaaaggtgtgtggagaaagaacatcccttcgagctgtggcttagagctgtgacttggcaccacgtggttagtcactatcaagttagaagcctttgtgggaaatctggctttggtaggatctgggaaatttggacccctcatttgccccctggcatctctaaattccagagcccagctttgatggggcttacatccccagctgttaacctgtggggtgggccccagactgtggccaggtgcattgcgctaggggagacagatccacagcaggcagaatttgaggaggacttaaaatacctgctttgggaggccaaggcgggcagatcccctgaggtcgggagtttgagaccagcctgaccaacatggagaaaccctgtctctactaaaaatacaaaattagttgggtgcggtggcacatgcctgtaatcccagctacttgggaggctgaggcaggagaatcgcttgaacccgggaggcggaggttgtggtgagccgagatcaagccactgcactccagcctgggcaacaagagcgaaattccgtttcaaaaaaaaaaaaaaaaaaaacacaaaaaaacaaaaacccgctttgttacctgcctgtgggtggaattgagttcatctctgaatccgtggtagtcatttattgagcacgtgttttagtgagcatggcatggcgctggctccgagatcacagtgctgccgccctccttcacgtttctctgacctttcatgggagtcacatgcagacgcatcacttggtataattatacgtggaggaatgagcaagaggaggctggcgacgggactgctttaaaaatcccttcttctgtggataataggctaatagcggggtgtgctttagaaggtgtggcctccgccaagggcgtgggaactgcatttgtagaagctgggaggaccacacctggcttgggagacggcatgggtttctgaggtgcctggctccctggcctgtccagtgtggacagcttacgcgcagctaggtgaaatgattgtgcagttgctgagggattgggtggcagagctggacagaatttaggtcttctaacttggaacagggctgtgtccatcttacctaggtgtacagtttggggagcactgctgtttggtctagtgagacacacttggtgtaaatatctgtgccctgtagtacccagattccaagggaccagagagcatgcccgcacccacgggctggcgggagcccaggtcctccagggctgctgtggagcatgggcttcttggtgcccagtcctatagctgaacttgggcggcctctggctgttgcccccagggctggtctccctatagttcagaggcgagccagctctcagcagcagggagggccttttccatagtatgaacttggccacaccagaccagtcagcagtgtcgggaatcttggccctcaaggtccctgcctagccctggcctggacttcagcactggtcaaaggtccccagagctgcccttggctctgagcaggtgagtgaacttcccagagcacttttgtctgggcctctgtgccagtgtaaactgataatagtgatttccctgccccacctctctgccagctatctaagttttctttgttacataatcaggattaatttaagcagcctaggccatccatttagaaatggttagtgaagaaaggtgaatggggaggggtcagagtcccttagggggccaccaggtgcgagtccccttgctctttggggccttggtttcccttctgtgagttggggcagctgaagggaagggctgctcaggtggtcctgccacatcccagtgttgtgtctagtgagtacaggtgagagtgctcccaaccagggcagatcctgctgctaggcagtgagtcaggaaggaattggtaaaaatgacgtcattgctaagaatgacgtcttttttgctgtttatccaaaggaaaaaaaaaaaagcagaaataaaagcagcaggcagctgtccaccagaccccatgcaaagggcttttccttgaatcctcacagagactttaggcagtaggtgccattaggagccccacttacagataagaaaacgggggcagagaactgaagtgagtcgcccaaggacacacattgaggaggaagcaacagagctaggatttagatacagaggggtctccaagcctgtccttccagctttgaggtcctgggcctatatattccatcagaaactgaaaggtgtgttggggggtacctagggtcaggatggggttttatttctgtcccttccttgtgatgctgcagggactgtgacctggagttcccaacaccagtgccctgtggctggtagcctcctcctgggactccaggatctattgtttgatttagccattttcttctgtagtccgatgggagggattcaattcaaacctgcaatactgttctttgggccatacaggccatttatcagcaagtagagaaaaacacccacaccttctagcaagattaagctagttctgtggttcttaatgataatttaagccattttgattaacctaggtggtggttttctccctaccaggtagggaatatactggagcctttctaaaaatagttccggtgaagataaacatttattgagtacctactgtactccactaggtgaatacaaggatttctcgttcatctcaggaagcatggttaggggattttacagacgagggaactgaagttcagggaagttaagttacttatccaagttcatatagctgaaaaatagaataggatttcgaccttgtggtaggtggaaaccggggttgtctttgtgctctcaggcatgtggctggcgtggggtagaagctctctatataatggttgagtgactggatgagcttcaaagctggtccctctggcttttcctgctaccccaggccacgtgcccagaaggaacgctgtcttacctgggaggtctttattgactgtttgacgcccttcccatcctatcccaaccccttccccatggcacctagtttccccaaccagaacgtacgttacttatgggcagagacggtctttgagcattgggtgggtggttgaacgcagtttctttgagattctgtgattgggattttcagcaaaatatggtagcaagttggtcagaggggcgagtctggcagtgggggagcccgggcaagtctaactgtttgctcactggcagaacaaagttggggaggttggaggggtaggggaactgaaagcaaaagaaagctcacagggagccccatcgtgcaaaaccgatgatggcagagctgccgggctgcagcgtggagcggggcgggagccttgtgtggagtctgtgaacatactctaggtgcctggatactcctcttatctccccacacatgggttgatgtgcatgtacggtgctttgatgtggactcttgtgttaaatttgttcttctgcgcagctttgtgacgcttcagtgagtgtgtctatatacaaaaggaaaacagttttggctgggtgcagtggctcacgcctgtaatcccagcactttgggaggccgaggtgggtggatcacctgaggtcaggagtttgagaccagcctggacaacatggtgaaacccagtctctaccaaaaaacacaaaaattagccatgtgtggtagcatgcgcctgtaatcccagctactcaggaggctgaggcaggagatggcttgaacccgggggctggaagttgcagtgagccaagttcacgccattgcactccagtctgggcaacagagtgagactccgtctcaaaaaagaaaaaaacaaaaaacaaaaaaaaaaccaacaattttgaggatgaggcatttcttccttacttatgagtgggatgtttatgggccggtgacattgacaaggctggcagagtcaaggggaggccctgggtagtctagcttactagcagtgaattcagttctctcttgaaagcaccgtgactgttggaatatttcagccttagcctttgaatactgacggagtgccaggctttcgtctgtcaagatgcccctctgtgacctcagctggttaatgtctcaagcgcttctttaggagacagaatgggttggtattgaaccaaccactattgcccagtcttgtgatgaccagggttgtggaacagataagttgtgtgacctccacgggtcagggctgttgactttgcctgtaagttacactcttgcagctgggcatagacacagtcctcaggggttttgtggacattaacaagtaaggatttaggtgactctgacatagggtcttccccaaggtcaggcacagaggaggtggcatccatgggacttagcatgttgtagaaacagagcatattgggacaaaagggaagttgaagatcacctgggatcctttagcgtccatccctttgtgagagataggatagcctagttgttaacagcatgactctggccgaccgcctggcttctttctagtcttccttctgtactttgtgaccttgaggcaagtcatttggtctctgtgcctcagtttcccaatttgtggaatggggataactggttgctaatattgctgtttttattgttataattattttgtaaatagaagggttgaaggttcagggaagcaagttgattgacctgaggccatacaatgtatcagtgccagatgcaggatgagaaagaactgtgactcaggccctgtccctcttaccagggcagggcaggacagggaagctgggcaggagagactggcagctcagttccctctccagtccagggtagtcccttccctttctgtctcgcagtgaggtcaccagttgcactcatgaaatcttagtcctgttatctggcatctttggaatttgccccacctgtagggcagagataacttaatcctttttggtgggccacatatgggatattctgggtgtgttctgggtacactgggcatgggccaggcacagacccttccatccattggaggcttttctagagaaggggtggagaccagattgggttcctagggtcgggggatgtgggaatggcaccctctgaactacaggcaaggctgggagctgctgccagtgggcggagagggaaatctaactggtatgtgatgttagtggtggcctggcaagcagctgtagctttggagagagcgaccagcctgtccaggggcctggtagggaaggcttctgttgcacggcctgttgctttctctcagatactggagagcccatctgtcttgcttactgcatggcttttcatagctcccatcatattgctgttgggtgcgattcatagccatggaagacacctgatcataaagtaaattccacacactccagcaaggtattcagggccttgcatggtctagccccaccctacctttcttccagcaaacaataattgatcatctaaggtggcagcttctctcctaagtctgaggctgcttctctaccctcacctgactgctgtcttctctgcacaccagaccttccggccacaggtcctcattccccagatgcaccagcatgttcacatcctcctgcagcgggaattgttttcttcctctccatgccaaatttgtctttttctttcccagtcaaagtaacatatgtacatagtcacaaaatgaaatagtgtagaagagattgtagtgacagctctaattcttacagcttgacatactcttcctttttctaggtggctgttcaaatggcttccttccagccaccttctccaggttggatgtgatctggactctggatctctaccctatagcacatcctgctgtgacctattccaaggagaaggggggtttggtgctggggcttctctcctaggaggctgaggaacttggttattgctatcttagcagaattgttattttctaccaaatgtgcaatgaaaactcttcactgagtcttttgcccctagcaatagcagtgcttcctgaagccccagtagaccctgaaggtttcaggactgtgtctggagagcatcagtgacaggtggcaggaatcctctgtggtccacttcagaggcggcagatgaccaggaggtcagactgtggctggtcttttcagaaggacaaacgtgacccttctgaaaactgggaccattcggggacattggtggaaagacagaggagcctttatggtttgttctcacacatatgaatccactttctcccccctccaacatcagggtgacctgaacgctgaaggaagtctaggccttcctgtaggtgaggcagggaaagccacgtagacctgatttagttgaagtgttttccaccaggtctcaactcttcattttgtcttggtatagcttttctggctgactttctagcaagctggttgggctctttgcttgttccaaaatggtagttttcaccagagacttttcagatgagcaggaagcttttttcagaatgtatgttcttctaactctgcttgagtcccccgccatgtattctgataggcatttgttttcccaccccatcccccacttttttgaagtgggggcaatgactacttttaggggaatcatttttctgttgctggtttcaaaacattaagagcaccaattttttttttttttttgcaacagagtctttctcaggctgaagtgcggtgacatgatcatagctcactgcagcctcagtctcctgggctcaagtgatcctctcaccttagcctcccaagtagctaagaccactggcacccaccatgcctggctaatttttttaaaaaattactttctgaagagatggggtcttgctatgttgtccagactgggcttgaattcctggcagcaagtgatccacctgccttggccttccaaagtgctgggattacaggtgtgagccactgcacccagctcaaattttccttttcattaaaaacatacatatatgtatatgtatgtatatacatatgtatatatgcatgtgtatatatatgtgtgtatatgtatatatgtgtgtatatatgtgtgtgtgtgtatgtatatgtattatatgtatattctctttgtgtatttatttttgccagtttgggagatgttagaaaaagacacgatttggaaacttcaacttagggataaagttagttatactctgagagctgcagttaaaggattatttgtgctgctctgctcttgcctgcgacgtgtgggaatgatgctgagtgatgtcctcctgcttattttgcgtgatttttttttgagacagattctcgctctgtcacccaggctggagtgcaatggtgcgatcttggctcactgcaacctccacctcctgagttcgagcgactctcctgcctcagcctcctgagtagctgggattacaggcgtgtgccactacacctggctaatttttatatttttagtagagatgggattttgccatgttggccaggctggtctcgaacccctgacctcaggtaatctgcccgcctcggcctcccaaagtgctgggattacaggtgtgagccgccacacttggccaattttgcatgatttttacatggcttttcaaagggccagggtgggactatccaaagccctgttaagagtccctcttctgccaaggagcctaggaagggagcaggtttgagtgaggaaggctggtggttttggacggggaacgggtggttttggacgggtagtgccaacggtttttgtgtgcgtggtgctccttgatgtggtctgggtttctgcatttgtagtgtgtgccttctaaggatgctggaaggtgagacagggctttccaaggcctagatggggtttgtggctttacttaggaagacagtcctttccataaagcgtggtgccaaatgcttttcctcctgggcctcctgctgtgatttgtggcgtggagtttcagtgagggagggctctgcaggaaccagctccttggtctgatcctttctggacaattgtggatgggagttggcttcttggtgtcttgagagtgtcctcagcagaccccagtgaagcaggagcatagagctctggatgggctcatggtggacatgggagagctgctggccagggggctgcagggtgaggcttggaaaacagggagggggctgggcttggccccgcattttactgtggtttatttagtgaatgtcagtgctagctggggacagttgacagacaagagaaaacactggtttgattttgaattctgaagcagacattgggcagcagaggctaacatttggcatttatcctaaactttcgaggtgcccgagccttatttcctttctctgggagaaagtctggaacagagacggtgcggagcagcctctagggctcagccctgggcccccctggagttgtgctgctcatggtatcacagtgcttgtttgtttcctgtttgtatccccattgcacctggctcaaggtaggtgtaaggcaaatgctttagaatgagccagtgagtagatttcacatgatcgtctcctcagtcctagaaatgccacgtgaacttcgaacatggaaagttttttatttttgagagattggagaggtgggagttacaggctgtctccaggtcaggcagggagtcagtggctgagtttctgatgctacagatggctggcttgggtggcatgacctctgcaggacccctagaagggcctgaggcccactaccaggctcagcttgcccccttctcttttcttttttggtcctaggcctggatcagaggctccttacccacaggatcttggacaagtcattttccttcttgggcctcagtttcccatctgaaaaggcaggggctgggctggatgtggtctccctagggccattgttgcttctgttacatgatcccgccagctcacctgggacagaacgtgcattttccactctccctcctccccgcagtgagagaacgggccagtgagacaggcctttcctgttttgtcatcttaggggagaattggtgtcaggggctgacccttcactttgttctagctttgctaggagtttgtggagacagtggatgcagatacagacagagttcatatcactgggagtttcactgtcctggagcagatctggagctggaggggacttgctcaggtcacactgggagtggcagtgtcaggccagagacccttgtctcttgattccccgggcaggacacgtttctccatcctgcaggcaggtgcagaggaggaatgcttattcataggcagcacgtgagggctcctctcagctgcttatttggcaccctctttcccctccaggggccagccacacaaccacctgcctccggcctgctccccacacagttgccagaggggtctttctgactctctctgacacctggatgttcttggcacttgctgcttcaagggcataggttcccattggctacggctgtgttttcacacgtgtgtttggtcaggtgtctctggttattaaatgagacaaggcttgcattgctaaagacagaggtttaggaagtgccttggaaaaccaagtgaaacaggtttctttccggaaggatttcccagaggctttagtatggtaatgtgcttatgcatttccaagaggggagaactaaaatgcaaacgtggaaactgattttaccgaacaggaggagactagaagctaggtcttgggcaggaactgaaacctggacaggaaaagaaatttgtgaaattctctgtctccggttgtgtgtgtgtgtgtgcgtgtgtgtgcgcgcgcgcgtgtgtgtgtttatttttaatctctgccctgtctctgcatcctgattcattcatttcctttttcctcctctccaccctcacttccttttcttgtatttttaaaaattgtagtaaaatatacataacaaaatttctcatcttacccatttttaagcatacagtccagcggcattaagtacattcatactattacacaaccatcagtgtcatgcatccacagaactctcctcatcttgcaaaactcaaactcctgtacccataaaacaagaactctccgtcctgttccctcctcaccccagcccctggctacccccattccactttttgtctacaaatttgactactctaggcacctcatatcagtggaatcatacagtatttgtctttttgtgactggctcctttcacttagcatgctgttgtcaagaactatctatgttgtagcctgtgtcagaattttctttccttttttaaggctgaataatattccactgtatggatatattacatcgtgtttatcccttcatctggtgatggacacttgagttgcttccactcactcccagatgttttttcccctctctgatcctcaaggaatagaaaatgcccagccttcatttttacattttacaggtagtggagctttaaaaaagagagtactttgggaggcacagataggagcatcacttgagcccaagagtttgagaccagcctgagcaacatagtaagacccagtctctacaaaaatcagctgggtgtggtggtgcgcacctgtagtctgagctactcaggaggctgaggtgggaggattgcttgagcccaggaggctcaggctgcagtgagctatgatcgtgccactgcactctagcctaggtgataggtgagaccctgtcttaaaaaaataaaaataaaaaataaaaaagagactaaattgattattgtctctctggctgtggccacttctgcctgccttcctagccgcctgccttctgcctctcttgcctctcctgaggctgctgcagggttgatccctccttgcctcttccttacactccttcgaggcaccctggtggttcgtttcctcctcctgttatcatacactttccttgtttttccccattgttttttctcctctgtatcctggtgccaacctcagtgggtgctccctgcaggcaggtggaagaaatgatggtgctgcaggatgaatgaggctctggccccaaacttggctgctgtgactgcagtggtcccagcgggggcctgaccaggcccatctctgcgcttctgggccacttgcctctgtctggggcttgtgtcattaactaagacctgcccttgagtaaaccaccctgaggacagagaagtccactgaggtgcggtgactgaggcagaactcaatcttttagaggtttattctatcagggttgaggatgcaccggggaaaagaaacacaagttatagtaggatctgtgttctgtgctttttccaaagagggctctggtaacgtcagtatttaaaggggaaagagcaagcaggagggagagaagaaaaataaaagaaggaagggtaggcattaggcaagtggtaccattcttgtgaggctctgattagcacttagtgaatctgcattttacatgtgaaaagaagggagttggggaaagtgaatcatggtcttgcactcagtaaatctacgttttacataagataaagtaagcttatgaaattagagctgtctgtttgggaacaaaaagaaggtcagtttttgcatgactcacttcccaagcttaactttctttttctttgacatagtgagtttagggccctgaggttttatttttctttcacagcacaaagatacccagttgacctttttttttcataacagaatgatgcattttggttcagtagtgtttcctccaactgctctacccctaatttaaaaaggggagggggtgagaaatcagtcccaaatgtccctgtaagttttggtgtgatgccagcctccaactggctgacatgagcagttttgtaaaggagagaccctcttgatggcttcacgtatatcatggggtgggatggggacagtcattattgacagccagcctgtgccaagtgtttcccagcagctctctgggcgattattccagccaaggatggccatgccctaaggttaaggaacctgcttgaggtcccagagctggaattgagattgacaacctcaggctgggtggctgtacagcctgggcactctctgtgccccctgccctcactcagccactccctccataggtcaccaggggtaattccctactgcccaggcagagggctggggctggaaggggtctagatggtcacttagtggttccccaagctgagtcctgatcaaaatcatctggggaattttaaaaagaaaaagaagacttgaatcagtgtgtgctagggtggtgtctatggatgggtattttcaaacatttcccgggtaactctgatcttcagcccctgctctgatcctccctttcattttccagtccaggacactggggaccggagagatgagatgccgtgaccaaggtcactgggttgtagccagagccagcatcaggtccaaagtgcgatctcagtagccagttctccatgctctgtgtttgttcagactgccagccctgctcaatggggctctggaacttaaggaaggcctttgaccataggctgggcttgcaaaaccttggtaggaccctgcccttggctggaaacctcagggctccagccagggctcatccccaagaagatacactgccattctccaaagtgtgggggcctctcccctgaagggcgctgcctggagccacctcttgttcacaggcccatgttaggccccctgggacaggttgccttggctccatatgtggttctgcagatcacacccaggcttgagaaatgcggtgacacgtgaactttgcattgatgtgaaaaggtccaaattaaaggtgatggcaagcacagctaagtccaagaaagtgtggctcctatttaggggtggtgggctaagagacaagacacagtaccctttcaccccggtgggtattctaagttgggttagtttgttcatcaattcattcattcaacaaatatttattgggttcccaataaatcatcttactggtccttggagatctgctgtgaacaagacaaacacaaccccacctctgtggcctgcacaaccctggaaggtcacacactagaaccctatcacttggcctctccatgaatcaccgtcatgtagcccctcgacaggggactcttgtgttattactgacaatattgatggttttagacacatattatcccatttaattttcccaaccattctctcaagtggggaaactcaaacttagaaagtttaatgaccttgcccagggtcacaccatgagtgatggcatctgaattcagccccagttctctctgattccaaagctggggttcttgacagccacattgtaccacctggtacccttgctttttgtcaggggcaagtataagaagaaggcaggtgacacgtgaagctttatttgctctaaaacttgagcgatttcatatgtcctaaaggaggagttttgcctcttccttcccagcatgaacacttggcatggtgtgtacatcttcattcgtttggtctggccaacagccactcgggagctgaatgaggtgttgtgaccatgacctgggtattctcttggttcagataccttcttggttggcacattcactttctcgtccttcccttggtctttcttgcttataatatatcccttttttaatttttaattttttttaagacagggttttgttctgtcacccaggctggagtgcagtggcacaaacatagctcactgcagcctcaaactcctgggctcaagggattctcccacctcagcctcccaaatagccaaggctacagaggtgtgccgccatgcctggctaatttcttatttttttgttgaaatgaggtctcagtatattgcccaggttggtctcaaactcctggcctcaagcaatcctcctgtcttggcctcccaaagcgccaggattacaggtgtgagccatcacacctagcctaatgtatcatcttattaaatcagatcaaatcctttttgaaaagacttaaaattgaaatcactttaaaaaacgaaaggatgcagggctaccctccctgggaccctggggcccaggtgtcttggcagctgccttgggctgggccagaagatgtttttgccagtctgtggtaggaaaaagggtgcagagtagcgagtttttaataaagctaaactggccgggtgcagtggctcacgcctgtaatcccagcactttgggaagccgaagcaagtggatctcgaggtcacgagtttgagaccagcctggccaacatagtgaaacccaatctctactaaaaatataaaaaattagctgggcgtggtggagggcgcctgtaatcccagctactcaggaggctgaggcaggagaatcgcttgaacgtggcaggcggaggttgcagcgagccgagattgtgccactgcactccagcctgggcaacagtgtgagactccgtgtcaaagaaaaaaataaaaataaagctaaatctaatttaaagtaccattttataatcagaggtagtcttccttacttttttttaagcattaaaaatgccctttcttttacaaaatcatgtttgtggtggagggcagtggtgattgttgcttatattgttattgtttttgcgtcctttctgggcaaaataaaaagtttgccttggtgtgtccatttcctttgtggttttaatagctggtgaaatctgaactatgaaaatgaccactaattcaggtgattggttttcaccgttcctccaagccctggggtacctggggctctctgtcccggtgagtgagagggagccccagagagtcctttgcccatcttcaatcagagaagccctccttttttatatgtaggattagattttttttatgattttgtttggagataaaaggatacccctgccaaaagttgaaaagcttctcctctaggatgtgtgttgggggggagtgggggagggagggagtcggggagggaggaagggaagggtgggaggaaggaaaggagggaggcaggaaagaaggaagggaggaagaaggaaggagggaatgtagtgactttggtgggactgagccatggtggatcttctacttggcgagtatttcttgcctatatactagtcagagttctccagagaaacaggtaataggatgtgtaaagtctacttgggtttgtaagaccagcctttggttgaagaccttccttgggtcctagcagacagaaaccaggagagacagagacatctatatccggctacatagagaggttatctgtctaactctctgcctgttctctatctatatctgtctgtctgtctgtctgtctacctacctacctgtctctgtctgtctgtctgtctacctacctacctatctaatctacctacctacctacctatctgtctgatctacctacctacgtacctacctacttagaaattgagagatttactttgaggattgacccacatgattgtggggactagccaagtccaaaatctgcaggctggagatttagggagagctgatgttacagtttgagtctgaaggcagtctggaggcagaatttcttccttgagagagacccagtttttttctcacgaggccttcagctgattaaatgaggtgtatgtacccacagtatacaggttaatctactttattcagagtctactgatttaaatgttaaactcatttagaaaatcccttcatacatacatctaaactagtgttagatcaaatatctgggtactgtggctcatccaggctgacccataaaattaaccatcacacctgtgcaagcgcttttccctcctggatggtgtcctagggatgacagaggaggggaaagccaggtctctgcttcaaggagacaaaattatgcatacgaagaaattaagaatgctgctgtgtctgtggagtagccattcttttattcctttactttcttaacaaacttgcttttacttaaaaaaaaaaaaagaaattaagaacaagaccatttatatttaagtgccaacttatgaaatgtaaaaagggatttagaggtgacaaggcaagtgagggctggaggatttggagagatttcatggtgtagggactgaataggagcttccagaacatggaggtttcagataagtgaggacacagaagtcttcacaaccagagtgggcaccacaggacaattctacatctatctaggactctgagtttttgaagggtttccatatgcattgtttggtttgctgcttgcaacaaccctgttgttttaactgaaggtcttagggcctagggattccccagaggccacacaacttgccagtggcaggggaaggtcttactcttccacagccttctctgtctttctccctttatggagcataatgaaatgtacgtgcacacattcatgtagatttcattatgtccatgtagaattcattttgatttcaaatatgtttccttcccagagaaatcctgtgaaactatgacattgtttttctctctctccttctccaggtcttattttccttctttaccatcctgattaactctatttttgtttgttttctcttcttgcccgctcccagacacgaatgcagagtttgagtccagatcccaaagcccagtacacaagtatctacggagccctcaagaaaatcatgcggaccgaaggcttctggaggcccttgcgaggcgtcaacgtcatgatcatgggtgcagggccggcccatgccatgtattttgcctgctatgaaaacatgaaaaggactttaaatgacgttttccaccaccaaggaaacagccacctagccaacggtattttgaaagcgtttgtctggagttagaaagttctcttct

SEQ ID NO: 14088 - DNA, 548 bp, Homo sapiens
cttgatacgcagtgctcccctccccactttctctgccctcctgtggatcacgggtgtcctagggctgttgggagcctggattaaagttgctgagtggccggctgatgatcagatccagggagtcagaccagaggtggggacatcttttcaaagagacagggtcttgccttgtcgcctaggctggagtgcagtgttgagatcatagtttactgcagcctcgaactcctgggtacaaggaatcctccctcctcagcctcctgagtagctgggattacagacacgaatgcagagtttgagtccagatcccaaagcccagtacacaagtatctacggagccctcaagaaaatcatgcggaccgaaggcttctggaggcccttgcgaggcgtcaacgtcatgatcatgggtgcagggccggcccatgccatgtattttgcctgctatgaaaacatgaaaaggactttaaatgacgttttccaccaccaaggaaacagccacctagccaacggtattttgaaagcgtttgtctggagttagaaagttctcttct

SEQ ID NO: 14089 - DNA, 4815 bp, Homo sapiens
ggtctctacaacgccaagatctaactaagctttaaaaggtcaagaagttttatggctgacaaaggactcgcgcaacgcagaaggcctttcccaccttaagcttccggggatctgggaattttacccccattctcttctgtttgtctgagtctcatctctctgcaagcaagggctgaaatcattttgtttggttgttttgagggagagaggcggggtgggggggtgcaaatctgccagcagctcttacgtaaggcatgttttattggggagggctgagcttttattttctcctctccagtggggttggcttttattgtttcttgtttgggtttggaatggaaatatggatagcagcataaagtacttttattttgacaaaattcatttttttcaacaatggagacatagatttgacccacaataacttctccccctctctttttactctgctcaaaaagcatctctcctcccattacccaaccttggtcataagtgtgcctggctggtttgcagatatttgttctgctttgtaaaaattggccattagtgcatttattgagatgatctctaaagagctatgccctgacctacccctgattctatgacattggggcccttcttttgctgaaactgccttacgtaatggttttactccttgaaagagatttgacggaatccattttatgccaagtgctgccctgcactgtttctgcaatatgtggtgtatgctgtggtgatcttgctgggaatgattataagtgtgtgtgtggtgggggagtgggtattacatgcattgctgaagagtcatcctggtgttcctcattcctcccaccttcccgtggtcattttaattacggggcagtgtcaccgcaaagggaggaaactcaaagccgaaagcaaaattccaggcctgattctggcttttgaggttcctggttcttgaagccaggcctgacccgactctcagatggggtcagtcccgtcgctttgcagactgaccctggaaatctacaaaatgcagattttcctgatttcctcttctcttgcccagttttttttttttttttttttttttttttttaaagcctggattgtaaccagattttcttttttcccccttctcagctgtagatatgatatctcctttcagggccccagcttaagggcaaagtgagttaatgtgtagacaaaggcgagggacaagagagagttaacatctagacagtggaaaaagccatggtgtgtggtttctgggaaccaccaacacttgcaggtttagctttttcccagggttgactacaagaaagaaaaccatgtttttgcaagattaaaatgtggttgagtgtgcctaaattaaccatccccatttttatcatatttccaccatcacttcagggttttaagagtcagtgctcacctgggcggagctggtagtacattttgcttcttagaaagctaagtcctgggttccgtctgattttaggttccaggaacttcctgagaacacccgatcgcagagggtaattttctggagtttgttttgcagggatagctgggagtatggccaccctgctccacgatgcggtaatgaatccagcagaaggtaatgtttcatggtcccagggaggggcagtaggggatgtgcaaaggggcacaaaaaatggttgtgggagagtggagaggactgaaggtgggcagagcggctcctagtctccagtcagagcagacaggagaattgaattttttactacgttatcaaaggcctcaagaaaggacgtgaacataagagtttttggtattcctgtgctcggagctactcaaagtgtgttctacagaccagcagcatcagacatcttgaggggtgttggaaatgctaattctgaggctgggtgcagtggctcatgcctgtaatcccagcattttttgggaggccgaggtgggcagatcacttgaggtcaggagttcgagaccagcctggccaacatggagagacccccatctctactaaaaatacaaaaattagcctagtgtggtgtgtgcacctgtaatcccagctactggggtggccgaggtgggagaatcgcttgaacccagcaggcagaggttgcagtgcaccgagagtacgccactgtactccagcctgggccacagagccagactccatctcaaaaggaaaaaaaaaaaaaaaaaagggaaatgctaattctggccggcatggtggtttaaaactgtaatcccagcactttgggaggccaaggcaggcagatctcttgaacccaggagttcaagaccagcgtgggcagcataatgagaccccgtctctatgaaaaatacaaaaattagccaggtgtggtggtgcatgcctgtagtcccagctgttcggaaggctgaggtggaagaattgcttgagtttgggaggttgaggctgcagtgagtcgtgattgcaccactgcactcagccagggcgacagagcaagactgcctcaaaacagaaaagaaaacaaaggctaattctcaggctttacaccgaacctactggatcagaatccctggagctagggaccagaatctgtttattggtgattctgttgcatgcttttgcactattctaaaacctatgtgtgcatacacacacacacacacacacacacactcactctcttagcccttgttaacccttatcgatcctagacaaatgtatggggaacccatcagaggctattctttagggctagtgttcaatttgactgtttttaatatgaaagattatggatcacatttcaaacagatgtgaacgtggagagaataatacgatgtaccgcagtgtgtccatcactgttcttcagaaattcacattgggtcattttgttttagccatctctttccacattatcttctttttgttcttttaaatttcgggggtaatatgaagcaagcctcagctgggcagaccagagtctgttccctttttatatatcccggcgtcttagccgggtactcgtgtctgaatagtgagtaccttttgggcctggcactgggcaggccttcagctgggtcattctctacctggcgatggctttaggtgagttgtggagctcttttcacctttttgcctcatctgaaaatagttcctggccagaagggagaattggtgagaaaagtttcaacattttaagtctcatgctataagtttgcctgtcttttgtctttcaaggtgaagctattaaatttgttctcagctaccctccatgtcctagcagatagaggacttggtctgaccttcagggttgtgatggggcaggttgggaggtgggcggggagtctctgtggtctgggtgctgaggttgacccgatgggcaggtgaagaaaatcaccttctccattccccttgatttctttatcgtgtgccgcacgaggcatgctgaagggacacacacctttccccctttttatttacaaagtagagagctgagaaagacagctcatgttctgttttgttttgtacacattatctttctcaagagatgtgatgtccttaagtaaactgacctgccttcatggcttgtcctgtaatgaatgcgttcaagacagtgttttggggacaggaaagaggcattcttaggtaagcggtggtggggggtggggtggggtggagaggaaacccttctaggaagtagttcaatgaaaaacctaaaaatgcccaaataaacattcgcttacatattatatatcttgggcttctttttatgacagttcattcagggacccagtcagtaaacaggtagttaacttcgtgtaaccaagcaagggttttgtttatcttttttaaagtagaaaaaagtgaggctcaaactctctctttctccttgtcataactattggtttacagtctttatttgtttaaaagtaaagcacattgtatgtatttatttggcaatacatgaggccattaaaaccctgagcctaaggtaccacagttagtctcatttgcctcttgtcctgtgaactccacttagaatgtcattgaacttgggcagacataattctagtgtctgttccaaacgcactgtgtcacagaagctagaattaccattagaggcacaaacccctgagaatacacaagggggcacgcttccagtagatgtgttggggaaggaggagggcagaggggacaggggacaggattcagctttgtggtgggtcctgagggttcctaccaggggtagccaggatctgggaaacagatcagcgactctagtctgaagtggctgcctggttcgggggctgccttcagcaagattcaggcaggagagacggaaatagccaccttccaggcgtgagtcctggagataaaaatggattttaacctaggactgccgggagctggccctccgcggctgctcagactagggctgtgtgtgctggctctcgcctgtttccggtgtctaactggcttgtttctctttatggcttggcttcattccgacctggggtggggccacatccaacccactgcccactggctgtccgtctggcctgccccgcggttccaaccacagtggtgaagcagcgcttgcagatgtacaactcgcagcaccggtcagcaatcagctgcatccggacggtgtggaggaccgaggggttgggggccttctaccggagctacaccacgcagctgaccatgaacatccccttccagtccatccacttcatcacctatgagttcctgcaggagcaggtcaacccccaccggacctacaacccgcagtcccacatcatctcaggcgggctggccggggccctcgccgcggccgc

SEQ ID NO: 14090 - DNA, 503 bp, Homo sapiens
ggtctctacaacgccaagatctaactaagctttaaaaggtcaagaagttttatggctgacaaaggactcgcgcaacgcagaaggcctttcccaccttaagcttccggggatctgggaattttacccccattctcttctgtttgtctgagtctcatctctctgcaagcaagggctgaaatcattttgtttgggatagctgggagtatggccaccctgctccacgatgcggtaatgaatccagcagaagtggtgaagcagcgcttgcagatgtacaactcgcagcaccggtcagcaatcagctgcatccggacggtgtggaggaccgaggggttgggggccttctaccggagctacaccacgcagctgaccatgaacatccccttccagtccatccacttcatcacctatgagttcctgcaggagcaggtcaacccccaccggacctacaacccgcagtcccacatcatctcaggcgggctggccggggccctcgccgcggccgc

SEQ ID NO: 14091 - DNA, 4908 bp, Homo sapiens
tgaatagaaacaaaacttttgaatgctggattcaaaaaaaaaaaaaagttatctggacagcttctttgagactatttaaaaactggtacaacaggtctctacaacgccaagatctaactaagctttaaaaggtcaagaagttttatggctgacaaaggactcgcgcaacgcagaaggcctttcccaccttaagcttccggggatctgggaattttacccccattctcttctgtttgtctgagtctcatctctctgcaagcaagggctgaaatcattttgtttggttgttttgagggagagaggcggggtgggggggtgcaaatctgccagcagctcttacgtaaggcatgttttattggggagggctgagcttttattttctcctctccagtggggttggcttttattgtttcttgtttgggtttggaatggaaatatggatagcagcataaagtacttttattttgacaaaattcatttttttcaacaatggagacatagatttgacccacaataacttctccccctctctttttactctgctcaaaaagcatctctcctcccattacccaaccttggtcataagtgtgcctggctggtttgcagatatttgttctgctttgtaaaaattggccattagtgcatttattgagatgatctctaaagagctatgccctgacctacccctgattctatgacattggggcccttcttttgctgaaactgccttacgtaatggttttactccttgaaagagatttgacggaatccattttatgccaagtgctgccctgcactgtttctgcaatatgtggtgtatgctgtggtgatcttgctgggaatgattataagtgtgtgtgtggtgggggagtgggtattacatgcattgctgaagagtcatcctggtgttcctcattcctcccaccttcccgtggtcattttaattacggggcagtgtcaccgcaaagggaggaaactcaaagccgaaagcaaaattccaggcctgattctggcttttgaggttcctggttcttgaagccaggcctgacccgactctcagatggggtcagtcccgtcgctttgcagactgaccctggaaatctacaaaatgcagattttcctgatttcctcttctcttgcccagttttttttttttttttttttttttttttttaaagcctggattgtaaccagattttcttttttcccccttctcagctgtagatatgatatctcctttcagggccccagcttaagggcaaagtgagttaatgtgtagacaaaggcgagggacaagagagagttaacatctagacagtggaaaaagccatggtgtgtggtttctgggaaccaccaacacttgcaggtttagctttttcccagggttgactacaagaaagaaaaccatgtttttgcaagattaaaatgtggttgagtgtgcctaaattaaccatccccatttttatcatatttccaccatcacttcagggttttaagagtcagtgctcacctgggcggagctggtagtacattttgcttcttagaaagctaagtcctgggttccgtctgattttaggttccaggaacttcctgagaacacccgatcgcagagggtaattttctggagtttgttttgcagggatagctgggagtatggccaccctgctccacgatgcggtaatgaatccagcagaaggtaatgtttcatggtcccagggaggggcagtaggggatgtgcaaaggggcacaaaaaatggttgtgggagagtggagaggactgaaggtgggcagagcggctcctagtctccagtcagagcagacaggagaattgaattttttactacgttatcaaaggcctcaagaaaggacgtgaacataagagtttttggtattcctgtgctcggagctactcaaagtgtgttctacagaccagcagcatcagacatcttgaggggtgttggaaatgctaattctgaggctgggtgcagtggctcatgcctgtaatcccagcattttttgggaggccgaggtgggcagatcacttgaggtcaggagttcgagaccagcctggccaacatggagagacccccatctctactaaaaatacaaaaattagcctagtgtggtgtgtgcacctgtaatcccagctactggggtggccgaggtgggagaatcgcttgaacccagcaggcagaggttgcagtgcaccgagagtacgccactgtactccagcctgggccacagagccagactccatctcaaaaggaaaaaaaaaaaaaaaaaagggaaatgctaattctggccggcatggtggtttaaaactgtaatcccagcactttgggaggccaaggcaggcagatctcttgaacccaggagttcaagaccagcgtgggcagcataatgagaccccgtctctatgaaaaatacaaaaattagccaggtgtggtggtgcatgcctgtagtcccagctgttcggaaggctgaggtggaagaattgcttgagtttgggaggttgaggctgcagtgagtcgtgattgcaccactgcactcagccagggcgacagagcaagactgcctcaaaacagaaaagaaaacaaaggctaattctcaggctttacaccgaacctactggatcagaatccctggagctagggaccagaatctgtttattggtgattctgttgcatgcttttgcactattctaaaacctatgtgtgcatacacacacacacacacacacacacactcactctcttagcccttgttaacccttatcgatcctagacaaatgtatggggaacccatcagaggctattctttagggctagtgttcaatttgactgtttttaatatgaaagattatggatcacatttcaaacagatgtgaacgtggagagaataatacgatgtaccgcagtgtgtccatcactgttcttcagaaattcacattgggtcattttgttttagccatctctttccacattatcttctttttgttcttttaaatttcgggggtaatatgaagcaagcctcagctgggcagaccagagtctgttccctttttatatatcccggcgtcttagccgggtactcgtgtctgaatagtgagtaccttttgggcctggcactgggcaggccttcagctgggtcattctctacctggcgatggctttaggtgagttgtggagctcttttcacctttttgcctcatctgaaaatagttcctggccagaagggagaattggtgagaaaagtttcaacattttaagtctcatgctataagtttgcctgtcttttgtctttcaaggtgaagctattaaatttgttctcagctaccctccatgtcctagcagatagaggacttggtctgaccttcagggttgtgatggggcaggttgggaggtgggcggggagtctctgtggtctgggtgctgaggttgacccgatgggcaggtgaagaaaatcaccttctccattccccttgatttctttatcgtgtgccgcacgaggcatgctgaagggacacacacctttccccctttttatttacaaagtagagagctgagaaagacagctcatgttctgttttgttttgtacacattatctttctcaagagatgtgatgtccttaagtaaactgacctgccttcatggcttgtcctgtaatgaatgcgttcaagacagtgttttggggacaggaaagaggcattcttaggtaagcggtggtggggggtggggtggggtggagaggaaacccttctaggaagtagttcaatgaaaaacctaaaaatgcccaaataaacattcgcttacatattatatatcttgggcttctttttatgacagttcattcagggacccagtcagtaaacaggtagttaacttcgtgtaaccaagcaagggttttgtttatcttttttaaagtagaaaaaagtgaggctcaaactctctctttctccttgtcataactattggtttacagtctttatttgtttaaaagtaaagcacattgtatgtatttatttggcaatacatgaggccattaaaaccctgagcctaaggtaccacagttagtctcatttgcctcttgtcctgtgaactccacttagaatgtcattgaacttgggcagacataattctagtgtctgttccaaacgcactgtgtcacagaagctagaattaccattagaggcacaaacccctgagaatacacaagggggcacgcttccagtagatgtgttggggaaggaggagggcagaggggacaggggacaggattcagctttgtggtgggtcctgagggttcctaccaggggtagccaggatctgggaaacagatcagcgactctagtctgaagtggctgcctggttcgggggctgccttcagcaagattcaggcaggagagacggaaatagccaccttccaggcgtgagtcctggagataaaaatggattttaacctaggactgccgggagctggccctccgcggctgctcagactagggctgtgtgtgctggctctcgcctgtttccggtgtctaactggcttgtttctctttatggcttggcttcattccgacctggggtggggccacatccaacccactgcccactggctgtccgtctggcctgccccgcggttccaaccacagtggtgaagcagcgcttgcagatgtacaactcgcagcaccggtcagcaatcagctgcatccggacggtgtggaggaccgaggggttgggggccttctaccggagctacaccacgcagctgaccatgaacatccccttccagtccatccacttcatcacctatgagttcctgcaggagcaggtcaacccccaccggacctacaacccgcagtcccacatcatctcaggcgggctggccggggccctcgccgcggccgc

SEQ ID NO: 14092 - DNA, 571 bp, Homo sapiens
tgaatagaaacaaaacttttgaatgctggattcaaaaaaaaaaaaaagttatctggacagcttctttgagactatttaaaaactggtacaacaggtctctacaacgccaagatctaactaagctttaaaaggtcaagaagttttatggctgacaaaggactcgcgcaacgcagaaggcctttcccaccttaagcttccggggatctgggaattttacccccattctcttctgtttgtctgagtctcatctctctgcaaggatagctgggagtatggccaccctgctccacgatgcggtaatgaatccagcagaagtggtgaagcagcgcttgcagatgtacaactcgcagcaccggtcagcaatcagctgcatccggacggtgtggaggaccgaggggttgggggccttctaccggagctacaccacgcagctgaccatgaacatccccttccagtccatccacttcatcacctatgagttcctgcaggagcaggtcaacccccaccggacctacaacccgcagtcccacatcatctcaggcgggctggccggggccctcgccgcggccgc

SEQ ID NO: 14093 - DNA, 3651 bp, Homo sapiens
cttgcttaagaggagaaggaggtaacgcacacaagtgcctttgtctcagggtccccacggtgcccatcttgagggttttgcgggcgccttgcattgcctaaggcctggctttagaagcagaacatggagagagaggtttgcagcctgcaggaagctggccagccagacctgccgggcagcgggacccgcgggcagtgcctctgactcacggcacgtccttgatacgcagtgctcccctccccactttctctgccctcctgtggatcacgggtgtcctagggctgttgggagcctggattaaagttgctgagtggccggctgatgatcagatccagggagtcagaccagaggtggggacatcttttcaaaggcaagaagatgctgccaagacagggtcttgccttgtcgcctaggctggagtgcagtgttgagatcatagtttactgcagcctcgaactcctgggtacaaggaatcctccctcctcagcctcctgagtagctgggattacagacacgaatgcagagtttgagtccagatcccaaagcccagtacacaagtatctacggagccctcaagaaaatcatgcggaccgaaggcttctggaggcccttgcgaggcgtcaacgtcatgatcatgggtgcagggccggcccatgccatgtattttgcctgctatgaaaacatgaaaaggactttaaatgacgttttccaccaccaaggaaacagccacctagccaacggtattttgaaagcgtttgtctggagttagaaagttctcttcttcaacacgtccctccccagggtgttcctccctgtgacccagccgcctcgacttcggcccgcttgctcacgaataaagaactcagagttgtgtgtgcaatgcacacccagacacacgcacgcacacacacgcgcgcgcacacacatgcttttttctgttcccctccgctttctgaagcctggggagaaatcagtgacagaggtgttttggttttattgttatgtgggttttcttttgtatttttttttgtttgttttgtttttaaacattcaaaagcaattaatgatcagacataggagaaaccctgaatagaaacaaaacttttgaatgctggattcaaaaaaaaaaaaaagttatctggacagcttctttgagactatttaaaaactggtacaacaggtctctacaacgccaagatctaactaagctttaaaaggtcaagaagttttatggctgacaaaggactcgcgcaacgcagaaggcctttcccaccttaagcttccggggatctgggaattttacccccattctcttctgtttgtctgagtctcatctctctgcaagcaagggctgaaatcattttgtttggttgttttgagggagagaggcggggtgggggggtgcaaatctgccagcagctcttacgtaaggcatgttttattggggagggctgagcttttattttctcctctccagtggggttggcttttattgtttcttgtttgggtttggaatggaaatatggatagcagcataaagtacttttattttgacaaaattcatttttttcaacaatggagacatagatttgacccacaataacttctccccctctctttttactctgctcaaaaagcatctctcctcccattacccaaccttggtcataagtgtgcctggctggtttgcagatatttgttctgctttgtaaaaattggccattagtgcatttattgagatgatctctaaagagctatgccctgacctacccctgattctatgacattggggcccttcttttgctgaaactgccttacgtaatggttttactccttgaaagagatttgacggaatccattttatgccaagtgctgccctgcactgtttctgcaatatgtggtgtatgctgtggtgatcttgctgggaatgattataagtgtgtgtgtggtgggggagtgggtattacatgcattgctgaagagtcatcctggtgttcctcattcctcccaccttcccgtggtcattttaattacggggcagtgtcaccgcaaagggaggaaactcaaagccgaaagcaaaattccaggcctgattctggcttttgaggttcctggttcttgaagccaggcctgacccgactctcagatggggtcagtcccgtcgctttgcagactgaccctggaaatctacaaaatgcagattttcctgatttcctcttctcttgcccagttttttttttttttttttttttttttttttaaagcctggattgtaaccagattttcttttttcccccttctcagctgtagatatgatatctcctttcagggccccagcttaagggcaaagtgagttaatgtgtagacaaaggcgagggacaagagagagttaacatctagacagtggaaaaagccatggtgtgtggtttctgggaaccaccaacacttgcaggtttagctttttcccagggttgactacaagaaagaaaaccatgtttttgcaagattaaaatgtggttgagtgtgcctaaattaaccatccccatttttatcatatttccaccatcacttcagggttttaagagtcagtgctcacctgggcggagctggtagtacattttgcttcttagaaagctaagtcctgggttccgtctgattttaggttccaggaacttcctgagaacacccgatcgcagagggtaattttctggagtttgttttgcagggatagctgggagtatggccaccctgctccacgatgcggtaatgaatccagcagaagtggtgaagcagcgcttgcagatgtacaactcgcagcaccggtcagcaatcagctgcatccggacggtgtggaggaccgaggggttgggggccttctaccggagctacaccacgcagctgaccatgaacatccccttccagtccatccacttcatcacctatgagttcctgcaggagcaggtcaacccccaccggacctacaacccgcagtcccacatcatctcaggcgggctggccggggccctcgccgcggccgccacgacccccctggacgtctgtaagacccttctgaacactcaggagaacgtggccctctcgctggccaacatcagcggccggctgtcgggtatggccaatgccttccggacggtgtaccagctcaacggcctggccggctacttcaaaggcatccaggcgcgtgtcatctaccagatgccctccaccgccatttcttggtctgtctatgagttcttcaagtactttctcaccaagcgccagctggaaaatcgagctccatactaaaggaagggatcatagaatcttttcttaaagtcattctctgcctgcatccagccccttgccctctcctcacacgtagatcattttttttttgcagggtgctgcctatgggccctctgctccccaatgccttagagagaggaggggacggcacggccgctcaccggaaggctgtgtgcggggacatccgaggtggtggtggacaggaaggacttgggaaggggagcgagaaattgctttttctcttcctccctgggcagaatgtagcttttctgcttcactgtggcagcctcctccctggatccttagatcccagaggagggaagaaaatttgcagtgactgaaaacagt

SEQ ID NO: 14094 - DNA, 823 bp, Homo sapiens
gacagccgagatggcggcggcggcaaggacgccaccgggtcggaggactacgagaacctgccgactagcgcctccgtgtccacccacatgacagcaggagcgatggccgggatcctggagcactcggtcatgtacccggtggactcggtgaagacacgaatgcagagtttgagtccagatcccaaagcccagtacacaagtatctacggagccctcaagaaaatcatgcggaccgaaggcttctggaggcccttgcgaggcgtcaacgtcatgatcatgggtgcagggccggcccatgccatgtattttgcctgctatgaaaacatgaaaaggactttaaatgacgttttccaccaccaaggaaacagccacctagccaacgggatagctgggagtatggccaccctgctccacgatgcggtaatgaatccagcagaagtccatccacttcatcacctatgagttcctgcaggagcaggtcaacccccaccggacctacaacccgcagtcccacatcatctcaggcgggctggccggggccctcgccgcggccgccacgacccccctggacgtctgtaagacccttctgaacactcaggagaacgtggccctctcgctggccaacatcagcggccggctgtcgggtatggccaatgccttccggacggtgtaccagctcaacggcctggccggctacttcaaaggcatccaggcgcgtgtcatctaccagatgccctccaccgccatttcttggtctgtctatgagttcttcaagtactttctcaccaagcgccagctggaaaatcgagctccatactaaagg

SEQ ID NO: 14095 - DNA, 13660 bp, Homo sapiens
actccacagctgctgctcctagggaggagctggtaccatgggtgtcaggcaacagttggccttgctgctgctgctgctgctcctgctctggggcctggggcagccagtgtggccagtcgctgtggccttgaccctgcgctggctcctgggggatcccacatgttgcgtgctacttgggctggccatgttagcacggccctggctcggcccctgggtgccccatgggctgagcctggcagctgcggccctggcactaaccctcctgccagcacggctgcccccaggactacgctggctgccggctgatgtgatcttcttggccaagatcctccacctgggcctgaagatcaggggatgcttgagccggcagccgcctgacacctttgtagatgccttcgagcggcgagcacgagcgcagcctggcagggcactcttggtgtggacggggcctggggccggctcagtcacctttggtgagctggatgcccgggcctgccaggcggcatgggccctgaaggctgagctgggtgaccctgcgagcctgtgtgccggggagcctactgccctccttgtgctggcttcccaggccgttccagccctgtgtatgtggctggggctggccaagctgggctgcccaacagcctggatcaacccgcatggccgggggatgcccctggcgcactctgtgctgagctctggggcccgggtgctggtggtggacccaggtgagggccttggagccagtggagaatggaagggggcaagggcagggactataggacaggggttctgctgggactggcagaggcccttggtccccacctgcctactttcacaggcaattataatcaagacttatgagcagaaagtagttctcaggtcatcagagtttaattttcccacaatttgaccaaaaatactaatgatgggattctttaccaaacaacatggatgcttttctctactagctgctcctctgcctgcatctgtgggtctcagatcccgcctcgcaacctcaaaggtgagccttgcctctgtttctcctctgacccatctctgcagacctccgggagagcctggaggagatccttcccaagctgcaggctgagaacatccgctgcttctacctcagccatacctcccctacaccaggggtgggggctctgggggctgccctggatgcagcgccctcccacccagtgcctgctgacctgcgtgctgggatcacatggagaagccctgccctcttcatctatacctcggggaccactggtgagggtgcccattagccctagcaccagcctctgaactctcaggctgacctgaccccacacttgacttgtgactcagtgttgacctctgaaaccactttaccctctgattttgacatttgttttttgtttggctgttttttttttcgaggcagagtctcgctctgtcgcctaggctggactgcagtggtgcaatctcggctcactgcaacctccacctcctgggttcaagcaattctcttgcctcagcctcctgagtagctgggattacaggcacacaccactatgcccagctaatttttgtatttttggtagagacagggtttccccaagttagccaggctggtctctaacccctgacctcaggggacctgcccaactcagcctctcaaaatgctgggattacaggcgtgagccactgctcccagacttgattttgatatttggcctgaactctgacccccaatgtaatttgagaggtcaatgccagaattcttcctgtgtccagtaaacagccactgaaacctttgatcttgacatattactttcagtccaaattcagcctgtgaacccaaccacaaatccctatacttgactgttctctgagagcctcaaaccccaatgtaggcctggctgttggagatctatccctctggtcaggcccctctctgtgctgtcatgtcaccaccctgcccttgccatgccttcatcccaaggcctcccgaagccagccatcctcacgcatgagcgggtactgcagatgagcaagatgctgtccttatctggggccacagctgatgatgtggtttacacggtcctgcctctgtaccacgtgatgggacttgtcgttgggatcctcggctgcttagatctcggtaagcccacttctgaggatccctccagtctacaggaccacgggagtaagtgtcggcgtggggctgtcaaggcaaaaagacaccataggttacccagcaccctgtgttctcacttttgagaagggacacccaccaatgactaccagggccgcatggacagaagcttggacacccacacagtccctgatggccatgctttggtcaggaggtgacaagacctgatacgagtgatggtcacaggcatccaaggaaggtgtggtgctcaggagatgatggggatgctggcccagatttgtgacatggccccaagggcagctggagtaggagtgctctcaagcactccacagggctgtctctctggactcttgattcagagtctagatggggacctctccatagcttgttctttttgttttctctcttttttttttattttaatttttatttatttattttttttcgagacagagtcttgctttgtcacccaggctggagtgcagaggcatgatcttggctcactgcaacctctgcctcctgggttcaagcaattctcctgcctcatcctcctgagtaactgggattacaggcgcccaccaccacgcccggctaatttttgtagttttagtagagacgggatttcaccatcttggccaggctggtcttgaactcctgacctcgtgatccacctgccttggcctcccaaagtgctgagattacaggtgtgagccaccgcacctggctattttctctctctctctctttttttttttgagacagagtctcgctctgtcgcccaggctggagtgcggtggcatgatctcggctcactgcaagctccgccttccaggttcaagcgattttcctgcctcagcctcctgagtagctgggattacaggcacgcaccaccacgcccagctaatttttgtatttttactagagactaggtttcaccatgttggtcaggctggtctcaaactcctgaccttgtgatctgcccacatttgcgggcatttgcctcccaaagcgctgggattacaggtgtgacccaccacgcccggcctttttgtgttttccagctattatcatggccatgtgtggttgctcatgcctataatccctgcactttgggtgccaaggcaggaggatcacttgagtccaggagttcaacaccagcgtgggcaacatagtaagaggccatctgttaaaaaaaaattttaaaaagccacgcatggtggtatcgggggaacctgcccctaatatttcaatgtaggttctttttttttttttttttgagatggagtctcgctctgtcgcccaggctggagtgcagtggtgcgatctcagctcactgcaagctctgcctcctgggttcatgccattctcctgcctcagcctccccagtagctgggactacaggcgcctgccaccgcgcccggctaattttttgtatttttagtagagatggggtttcacatttagccaggatggtctcaatctcctgacctcatgatcctcccacctcggcctcccaaagtgctgggattacaggtgtgagccactgtgcccggcctcgatgtaggttctttctattttccgtaagtgctggccagctgagaaataaagagaaagagtacaaagagaggaatttgacagctgggcctccgggggtgacatcacatatcggtaggaccatgatgcccacctgagctcaaagccagcaagttttattaaggatttcagaagggaagggggtgtaagaaccgagaataggtacaaagatcacatgcttcaaagggcaaaaaacggaactactgatcagggtccaacaaagatcacaaggcaaagggcaaaagcagaactgataagggtctatgttcagtggtgcacatattgtcttgataaacatcttaaacaacagaaaacagggttcaagagcagagaactggtctgacctcaaatttaccagggcggggtttttccccaccctagtaagcctgagggtactgcaggagaccagggtgcatctcagtccttatctcaactgcataggacagacattcccagagcggccatttatagacctccccccaggaatgaattcctttcccagggtcttaatgttaatattccttgctaggaaaataatttagcaatatctctcctacttgcacgtccacttataggctctctgcaagaagaaaaatatggctctttttgcccagccccgcaggcagtcagaccttagggttgtcttcccttgttccctaaaatcactctcattctgttctttttcaatgtgcgctgatttcacattgttcaaacacacattttacaatcaatttgtacagttaacacaattatcacagggtcctgaggtgacgtacatcctcagcttatgaagataacaggattaagagatgaaagtaagacaggcgtaagaaattataagagtattatttgggaagtgataaatgtccatgttatcttcacaatttatgttcctctgccgtggctccagccggtccgtctgttaggggtccctgacttcccgcaacagtggtgagcacttgtgagcgattcttctgcctcagcatcccgagtagctgttattacaggtgcccaccactatgcccggctaatttttgaatttttagtataggtggggtctcaccatgttggccaggctggtctccaacacctgacctcatgatccacccacctcagcctcccaaagtgctgggattacaggcatgagccaccgcgcccggccaaatttttcttttttttttaattatgaaaagtttagctgtgcccggtggttcacgcctgtaatcccagcactttgggaggctgaggcgggtggatcacctgaggtcaggagttcaagacaagcctggtcaacatagtgaaatctgtctctacttaaaatacaaaaattagccagtcatggtggctcacgcctgtaatcccagcactttgggaagctgaggccactggatcacctgaaatcaggagtttgagaccagcctggccaacatggtaaaaccctgtctgtactgaaaatacaaaattagctgggcgtggtgatgcgagcctgtgtttccagctactcgggaggctgaggcaggaaaatcgcttcaacctgggaggcgggggttgcaaaaagagtgaaactcccttgcaaaaaaaaaaaaaaagtgaaaatagtttgatgacatctcatgtatcttcgcccagcatcaataattgttaacatgttgccagtttaatttcgcatatacttctctgtttcttttttgtttgtttttgagacacagtctcgctctgtcacccaggctggagtgcagtggcaccatctcagatcaccacaacctctgcctcccgggttcaagcaattctctgctgaggctgagcctcctgagtagctgggattacaggcatgcgcctccacacctggctaatgtttgtattcttagtagagacggggttttgccatgttggccaggctggtctcgaactcctgacctcaggtgatccacctacctcggcctcccaaagtgctgggattacaggcgtgaaccaccgcgcctggcgtctgtttgttttcaaacttttatcatggccaggtgtggttcctcatgcctataatccctgcactttggggtaccaaggcaggaggatcacttgagcccaggagttcaacaccagcctgggcaacatagtgagagtccatctgttaaaaaaaaaaaaaagccaggcatggtggtgagcacttgtgagcgattctcctgcctcagcctccctagtagctgttattacaggctcccaccaccgtgcctggctaacttttgtatttttagtagagacagggtttaaccatgttggccaggctggtctcgaactcctgacctcgtgatccgcccgcctcggcctcccaaagtgctgggattacaggtgtgaactaccgtgcccggccaaatgtttttttttttttttttgagtcggggtttcactattgttgcccaggatggaatgcaatggcgcgatgtcggctcactgcaacctctgcctcctgggttcaagcgattctcctgcctcagcatcccaagtagctgggattacaggcatgtgccctcacgaccggctaatttttttttatgtttttagtagagatggggtttctccatgttggtcaggcttgtctcaaactcccgacctcaggtgatccgcccacctcagcctcgcaaagtgctgggattacaggcgtgagccactgcgcccggccaaattgtttttttaattatgaaaagtttaggctgtgcccagtggtttacgcctgtaatcccagcactttgggaggatgagtctggtggatcacctgaggtcaggagttcaagatcagcctggctaacatggcaaaatccgtctctacctaaaatacaaaaattaccggggcatggtggctcacgcctgtaatcccagcactttgggaggctgaggccggcggaacacctgaagtcaggagtttgagaccagcctggccaacatggtgaaaccctgtctctactgaaaatacaaaattagctgggtatggtggtgggcgcctgtatttccagctaccagggaggctgaggcaggagaatcgcttgaacccggggcgcaggggttgcagtgagccgagatctagccattgcattccagcctgtgcaaaaagcgagactctgtctcaaaaaaaaaaaaaaaaaaaagtgaaaatagtttgatgacatctcaggtatcttcacccagcttcaataattgttaacatgctgccagtttaatttctttttttttttttctttgagatggagtctcgctctgtcgcccaggctggagtgcagtggcgcaatctctgctcacggcaagctccgcctcctgggttcatgccattctcctgcctaagtctccggagtagctgggactacaagtgaccgccaccacgcctggctattttttttgtatttttagtagagacagggtttcacggtgttcaccaggatggtctcaatctcctgacctcgtgatccgcccgcctcggcctcccaaagtgctgggattacaggcatgagccaccgcgcccagggccagtttaatttcacatgtacttccctgtttcttttttgtttgtttgtttgtttttgagacagagtctcgctctgtcgcccaggctggagtgcagtggcaccatcttgggtcaccgcaagctccgccccgcccgccccccccccccccccagggttcaatcagttttctgcctcagcctcctgaatagctgggattacaggcacgcaccgccacaagcggctaatttttgtatttttagtagagacagggtttcgccatgttggccaggctggtctcaaactcctgacctcaggtgatccacctgcctcggcctcccaaagtgctgggattacaggcgtgagccaccgtgcccagccacttccctatttttttccagaatatatcagagcaaatcctagacactgcatctttatgcttgtaaatattgcagtacatatctctaacatataagcactgaagaaactgtaaccaaagtgattattacacgtaacaacattaatatcatatgatgtccttaatatcatatgatgtaaccccttaatatcatatgatgtccagtctatgttcagatttctccaatgggctgttttggtttggttttgtttttagagacagagtcttgctttgtcacccaggctggagtacagttgtgtgatgttggctcactacaacctctgcctcctgggttcaaacgattctcatgcctcatcctcctgagcagttgtgattacaggtgtggaccaccatgcccagctaatttttttgtatttttagtaaagacagggtttcgccctgttggccagtctggtcttgaacttctggcctcaagtgatctgaacacgttggcctcccaaagtgctgagattacaggtgtgagctactgtgcccagccaattggctgtttttttgtttgtttgtttgtttgtttgtttttaacaattaaacagtctccccattgtatttgcttgtaggtctctgttcccctttcatctgcatttcttgttaaattggaaactttaactagaggtgttgttagattcagtttttttctttttcttttgagacagggtctcactctgtcacccaggctggagtgcagtggtgtaagctcggctcactacagcctccccctcctgggttcaagcgattcttccacctcagcctcccgagtagctgggactacaggtgtgcgccaccacgcctggctaatttttgcattttttggtagagatagggtttcaccatgttggctaggctggtctcaaactcctgatctttcaggtgatccacccccctcagcctcccaaagtgttgggataacaggtgtgagccaccacgcccagccccctatatcttattaatccatgtgtccatacgtcaatacaaccatacaaacattcaccaacccacccatctacctactcacctacttcctcactcattcattcattcatccacccacccatctatccatccttacacctatccatctttctctttttctttttttttttttttaagacagagtctcactctgtcgcccaggctggagtgcagtggcgctatctcggctcactgcaagctccgcctcccaggttcacgccattctcctgcctcagcctcccgagtagctgggactacaggcgcccgctaccacgcccagctaattttttgtattttcagtagagacgggtttcaccgtgttagccaggatggtcttgatctcctgacctcgtgatccgcccacctcggcctccctaagtcctgggattacaggcgtgacgatcctcacccagccacctatccatctttctacccccctgcctctgcatgtcactgtccagccatccatctactcactcactactctaactgtccacccatccatctactcactcactactctaactgtccagccatccatctactcactcactactctaactgtccacccatccatctactcactcactactctaactgtccacccatccatctactcactcactactctaactgtccacccatccatctactcactcactactctaactgttcacccatccatcttctcactcactactctgtccacacatccatcttctcactcactactctgtccacccatccatctactcactcactactctaactgtccacccatccatccactcactcactactctaactgttcacccatccatcttctcactcactactgtaactgttcacccatccatctactcactcactactctgttcacccatccatcttctcactcactactctaactgtccacacatccatcttctcactcactactctgtccacccatccatctactcactcactactctaactgtccacccatccatccactcactcactactctaactgttcacccatccatcttctcactcactactctaactgttcacccatccatctactcactcactactctgtcacccatccatctactcactcactactctaactgtccacccatccatctactcactcactactctaactgttcacccatccatctactcactcactactctgtccacccacccatctactcactcactactctaactgtccatccattcatctttccatccatccaccatatccatccacctgcccacccatctgcttagctgggcattcatttatcgtaatcaagagtgatttgagcttcgagtcagtgacaagccaaaataaaaattaaaaatgtggctgggcacagaggctcatgcctgtaatcacagcactttggaggccgaggcgggtggatcacctgaaaggtcaggagttcaagaccagcctggccaacatggtgaaaccccgtctgtacttaaaaaagtacaaaaattagccagctgtggtggcgggtgcttgtaatcccagcaactcagaaagctgaggcaggagaatcgcttgaacccgggagggagaggttgcagtgagcggagattgcaccactgcactccagcctgggcaacagagcgagactccgtctcaaaaataaaaataaaaaatttaatatttacagcccttatttagcattgctcactttataacaggcacggagctttcccggcatcctggagacaggatttgaacccaggcctgcctatgctcttctagtgagagcagtcctggctgggccaaggacacaaagatgaactcagtattgtcctgtatttcagggtgtgggggtgggtgagcacaggtgctaaaagcagcttcttacaacaatttggaagcatgacctgaaaccccctctcctgtcatctcccaggagccacctgtgttctggcccccaagttctctacttcctgcttctgggatgactgtcggcagcatggcgtgacagtgatcctgtatgtgggcgagctcctgcggtacttgtgtaacattccccaggtgaggctctaagattagggctccatggtgaacacccaagtatgaaatcccaggtaaaggtctcaggtaaagattcaggtactgaactcaagtccctcagataatacacctcatgcaagaaccccagataatgagtttcagacaaggcttccaataatggtttctttgatagctgtgctaccttgagcctcagtgtcctcatttggaaaacagggataatagcccctacccctatcatgagaatttccattaaaaattaattaattaaaattaaatttccattaaattaaagttctaggtaactactcttaggtgagaccccagatgaggcctccagtcacctctggtaacgtcccccaggcaaagctctgaggtcgcccctgcaggtaaccctctatttaagactccagtaactactctcatgtaagtaacccaggtagatcccttaggtagaggtcccccatcaccttccaggtaactcccaaggtaaggacccaggataacaccccctctaggtaaaggttccaaggcatgccccaagagcacctcctcctcacccttctggggacattcctgtagcaaccagaggaccggacacatacagtccgcctggcaatgggcaatggactacgggctgatgtgtgggagaccttccagcagcgcttcggtcctattcggatctgggaagtctacggctccacagaaggcaacatgggcttagtcaactatgtggggcgctgcggggccctgggcaagatgagctgcctcctccgagtgagtgtgcgggtacctggtgtgcagctgccctgaggctgagcccacaggacctatgtcaacactccaccctccaccccagatgctgtccccctttgagctggtgcagttcgacatggaggcggcggagcctgtgagggacaatcagggcttctgcatccctgtagggctaggtatgggggttgaggagcctttcctgggtggcaggggtggcgaccctcagtcttctgcttggctggaacgagctgctcaaaagcttgacgttggtgctcactagaggggtctgcagccttcatctggaccctgagccagtggcctgccttaccaccatctggggcctccgcctcagcttctcggctctgtccagctcccctgccttgatctcttgctctgatttactgggtctctgggtgtccatctgatttgttctcttgagctttctgtggaagacggcattccagccattggtcccttgtcctgtaccttctgttagtgtcttctcccagggccttgcaaggtcctggtcatatctattctcactgccatttgtctgtccgtcttccatcccttgttatccttttcctgtttctcatgggctccccataccgccttctctatacttctctctcattttctgtgtcgcttgtcgcagtctctcaaggtctctgaatgtctctctcatctctggatctccctgtctgtgtctttgggtctgtccttggcagggtgctgggtgatgaagagtccaccgttgttgaaaacctccagcagggggcttggctggtgggctccaggggttcttgttcctgctcctaccccaggggagccggggctgctgctgaccaaggtggtaagccagcaacccttcgtgggctaccgcggcccccgagagctgtcggaacggaagctggtgcgcaacgtgcggcaatcgggcgacgtttactacaacaccggggacgtactggccatggaccgcgaaggcttcctctacttccgcgaccgcctcggggacaccttccggtccgaggcagggtttctcggggcggggctggcgcggggccacggacgctttcagatcctagagggagtcaggctgaagaggcgggactttcctgtcgtaagagggcggaacttggagtcaggacttctcacgcgaaggcggggcttctcgattttcgagggggcggggctgactgggcctcctgatccccaaaaggggcggggcgggggcaagaggcggggcctctccttcccgggggcgtggtcacaagcgccggctccctccttgcagatggaagggcgagaacgtgtccacgcacgaggtggagggcgtgttgtcgcaggtggacttcttgcaacaggttaacgtgtatggcgtgtgcgtgccaggtgcggagggttctcattttaaacttccaacagctttgtgggtggaggggtcgttattctgattttacaggtggggaagtgctagggcccagagaggtttagagacttgctggctctcacagccagtgagcagagctgggcgaggctggagggtcagctatgggccctcgagatgggtcagccgagagtgaccagactgctctctaggttgtgagggtaaggtgggcatggctgctgtgcagctagcccccggccagactttcgacggggagaagttgtaccagcacgttcgcgcttggctccctgcctacgctaccccccatttcatccgcatccaggtgagcccagggtggcctggtgggtgggtggaagatcatagccagggggcgggtggatgtcacagtgattggaccatggtcactgccctgcaggacgccatggaggtcaccagcacgttcaaactgatgaagacccggttggtgcgtgagggcttcaatgtggggatcgtggttgaccctctgtttgtactggacaaccgggcccagtccttccggcccctgacggcagaaatgtaccaggctgtgtgtgagggaacctggaggctctgatcacctggccaacccactggggtagggatcaaagccagccacccccaccccaacacactcggtgtccctttcatcctgggcctgtgtgaatcccagcctggccataccctcaacctcagtgggctggaaatgacagtgggccctgtagcagtggcagaataaactcagatgtgttcacagaa

SEQ ID NO: 14096 - DNA, 2292 bp, Homo sapiens
actccacagctgctgctcctagggaggagctggtaccatgggtgtcaggcaacagttggccttgctgctgctgctgctgctcctgctctggggcctggggcagccagtgtggccagtcgctgtggccttgaccctgcgctggctcctgggggatcccacatgttgcgtgctacttgggctggccatgttagcacggccctggctcggcccctgggtgccccatgggctgagcctggcagctgcggccctggcactaaccctcctgccagcacggctgcccccaggactacgctggctgccggctgatgtgatcttcttggccaagatcctccacctgggcctgaagatcaggggatgcttgagccggcagccgcctgacacctttgtagatgccttcgagcggcgagcacgagcgcagcctggcagggcactcttggtgtggacggggcctggggccggctcagtcacctttggtgagctggatgcccgggcctgccaggcggcatgggccctgaaggctgagctgggtgaccctgcgagcctgtgtgccggggagcctactgccctccttgtgctggcttcccaggccgttccagccctgtgtatgtggctggggctggccaagctgggctgcccaacagcctggatcaacccgcatggccgggggatgcccctggcgcactctgtgctgagctctggggcccgggtgctggtggtggacccagacctccgggagagcctggaggagatccttcccaagctgcaggctgagaacatccgctgcttctacctcagccatacctcccctacaccaggggtgggggctctgggggctgccctggatgcagcgccctcccacccagtgcctgctgacctgcgtgctgggatcacatggagaagccctgccctcttcatctatacctcggggaccactggcctcccgaagccagccatcctcacgcatgagcgggtactgcagatgagcaagatgctgtccttatctggggccacagctgatgatgtggtttacacggtcctgcctctgtaccacgtgatgggacttgtcgttgggatcctcggctgcttagatctcggagccacctgtgttctggcccccaagttctctacttcctgcttctgggatgactgtcggcagcatggcgtgacagtgatcctgtatgtgggcgagctcctgcggtacttgtgtaacattccccagcaaccagaggaccggacacatacagtccgcctggcaatgggcaatggactacgggctgatgtgtgggagaccttccagcagcgcttcggtcctattcggatctgggaagtctacggctccacagaaggcaacatgggcttagtcaactatgtggggcgctgcggggccctgggcaagatgagctgcctcctccgaatgctgtccccctttgagctggtgcagttcgacatggaggcggcggagcctgtgagggacaatcagggcttctgcatccctgtagggctaggggagccggggctgctgctgaccaaggtggtaagccagcaacccttcgtgggctaccgcggcccccgagagctgtcggaacggaagctggtgcgcaacgtgcggcaatcgggcgacgtttactacaacaccggggacgtactggccatggaccgcgaaggcttcctctacttccgcgaccgcctcggggacaccttccgatggaagggcgagaacgtgtccacgcacgaggtggagggcgtgttgtcgcaggtggacttcttgcaacaggttaacgtgtatggcgtgtgcgtgccaggttgtgagggtaaggtgggcatggctgctgtgcagctagcccccggccagactttcgacggggagaagttgtaccagcacgttcgcgcttggctccctgcctacgctaccccccatttcatccgcatccaggacgccatggaggtcaccagcacgttcaaactgatgaagacccggttggtgcgtgagggcttcaatgtggggatcgtggttgaccctctgtttgtactggacaaccgggcccagtccttccggcccctgacggcagaaatgtaccaggctgtgtgtgagggaacctggaggctctgatcacctggccaacccactggggtagggatcaaagccagccacccccaccccaacacactcggtgtccctttcatcctgggcctgtgtgaatcccagcctggccataccctcaacctcagtgggctggaaatgacagtgggccctgtagcagtggcagaataaactcagatgtgttcacagaa

SEQ ID NO: 14097 - DNA, 5032 bp, Homo sapiens
ctcccaatgaggtccaccttgctgtcctgttgcttttctgtttggcctgattggagtgttcccaagggcagggatttctgtgctctgagtgtctggtacccagcagggatgggaggggaggcaagggagttagatgccagccctggagggtggatggggcaagcaggacagcaggaaggaggctagtggtgcccaaggggcagagacctgggaacccagaggccagtgatggaaagggttagcgccaggcagagaggggctggacccacacacaagaccaggcagagcaaacaaacgtagaggagaagggctgggggcaaagtcctggggagaggaccagccactgtcagcagtgccagggccaccacccctggggaggagccattgggctactcttgaggggccagaggtgagcctgaacactccacagctgctgctcctagggaggagctggtaccatgggtgtcaggcaacagttggccttgctgctgctgctgctgctcctgctctggggcctggggcagccagtgtggccagtcgctgtggccttgaccctgcgctggctcctgggggatcccacatgttgcgtgctacttgggctggccatgttagcacggccctggctcggcccctgggtgccccatgggctgagcctggcagctgcggccctggcactaaccctcctgccagcacggctgcccccaggactacgctggctgccggctgatgtgatcttcttggccaagatcctccacctgggcctgaagatcaggggatgcttgagccggcagccgcctgacacctttgtagatgccttcgagcggcgagcacgagcgcagcctggcagggcactcttggtgtggacggggcctggggccggctcagtcacctttggtgagctggatgcccgggcctgccaggcggcatgggccctgaaggctgagctgggtgaccctgcgagcctgtgtgccggggagcctactgccctccttgtgctggcttcccaggccgttccagccctgtgtatgtggctggggctggccaagctgggctgcccaacagcctggatcaacccgcatggccgggggatgcccctggcgcactctgtgctgagctctggggcccgggtgctggtggtggacccaggtgagggccttggagccagtggagaatggaagggggcaagggcagggactataggacaggggttctgctgggactggcagaggcccttggtccccacctgcctactttcacaggcaattataatcaagacttatgagcagaaagtagttctcaggtcatcagagtttaattttcccacaatttgaccaaaaatactaatgatgggattctttaccaaacaacatggatgcttttctctactagctgctcctctgcctgcatctgtgggtctcagatcccgcctcgcaacctcaaaggtgagccttgcctctgtttctcctctgacccatctctgcagacctccgggagagcctggaggagatccttcccaagctgcaggctgagaacatccgctgcttctacctcagccatacctcccctacaccaggggtgggggctctgggggctgccctggatgcagcgccctcccacccagtgcctgctgacctgcgtgctgggatcacatggagaagccctgccctcttcatctatacctcggggaccactggtgagggtgcccattagccctagcaccagcctctgaactctcaggctgacctgaccccacacttgacttgtgactcagtgttgacctctgaaaccactttaccctctgattttgacatttgttttttgtttggctgttttttttttcgaggcagagtctcgctctgtcgcctaggctggactgcagtggtgcaatctcggctcactgcaacctccacctcctgggttcaagcaattctcttgcctcagcctcctgagtagctgggattacaggcacacaccactatgcccagctaatttttgtatttttggtagagacagggtttccccaagttagccaggctggtctctaacccctgacctcaggggacctgcccaactcagcctctcaaaatgctgggattacaggcgtgagccactgctcccagacttgattttgatatttggcctgaactctgacccccaatgtaatttgagaggtcaatgccagaattcttcctgtgtccagtaaacagccactgaaacctttgatcttgacatattactttcagtccaaattcagcctgtgaacccaaccacaaatccctatacttgactgttctctgagagcctcaaaccccaatgtaggcctggctgttggagatctatccctctggtcaggcccctctctgtgctgtcatgtcaccaccctgcccttgccatgccttcatcccaaggcctcccgaagccagccatcctcacgcatgagcgggtactgcagatgagcaagatgctgtccttatctggggccacagctgatgatgtggtttacacggtcctgcctctgtaccacgtgatgggacttgtcgttgggatcctcggctgcttagatctcggtaagcccacttctgaggatccctccagtctacaggaccacgggagtaagtgtcggcgtggggctgtcaaggcaaaaagacaccataggttacccagcaccctgtgttctcacttttgagaagggacacccaccaatgactaccagggccgcatggacagaagcttggacacccacacagtccctgatggccatgctttggtcaggaggtgacaagacctgatacgagtgatggtcacaggcatccaaggaaggtgtggtgctcaggagatgatggggatgctggcccagatttgtgacatggccccaagggcagctggagtaggagtgctctcaagcactccacagggctgtctctctggactcttgattcagagtctagatggggacctctccatagcttgttctttttgttttctctcttttttttttattttaatttttatttatttattttttttcgagacagagtcttgctttgtcacccaggctggagtgcagaggcatgatcttggctcactgcaacctctgcctcctgggttcaagcaattctcctgcctcatcctcctgagtaactgggattacaggcgcccaccaccacgcccggctaatttttgtagttttagtagagacgggatttcaccatcttggccaggctggtcttgaactcctgacctcgtgatccacctgccttggcctcccaaagtgctgagattacaggtgtgagccaccgcacctggctattttctctctctctctctttttttttttgagacagagtctcgctctgtcgcccaggctggagtgcggtggcatgatctcggctcactgcaagctccgccttccaggttcaagcgattttcctgcctcagcctcctgagtagctgggattacaggcacgcaccaccacgcccagctaatttttgtatttttactagagactaggtttcaccatgttggtcaggctggtctcaaactcctgaccttgtgatctgcccacatttgcgggcatttgcctcccaaagcgctgggattacaggtgtgacccaccacgcccggcctttttgtgttttccagctattatcatggccatgtgtggttgctcatgcctataatccctgcactttgggtgccaaggcaggaggatcacttgagtccaggagttcaacaccagcgtgggcaacatagtaagaggccatctgttaaaaaaaaattttaaaaagccacgcatggtggtatcgggggaacctgcccctaatatttcaatgtaggttctttttttttttttttttgagatggagtctcgctctgtcgcccaggctggagtgcagtggtgcgatctcagctcactgcaagctctgcctcctgggttcatgccattctcctgcctcagcctccccagtagctgggactacaggcgcctgccaccgcgcccggctaattttttgtatttttagtagagatggggtttcacatttagccaggatggtctcaatctcctgacctcatgatcctcccacctcggcctcccaaagtgctgggattacaggtgtgagccactgtgcccggcctcgatgtaggttctttctattttccgtaagtgctggccagctgagaaataaagagaaagagtacaaagagaggaatttgacagctgggcctccgggggtgacatcacatatcggtaggaccatgatgcccacctgagctcaaagccagcaagttttattaaggatttcagaagggaagggggtgtaagaaccgagaataggtacaaagatcacatgcttcaaagggcaaaaaacggaactactgatcagggtccaacaaagatcacaaggcaaagggcaaaagcagaactgataagggtctatgttcagtggtgcacatattgtcttgataaacatcttaaacaacagaaaacagggttcaagagcagagaactggtctgacctcaaatttaccagggcggggtttttccccaccctagtaagcctgagggtactgcaggagaccagggtgcatctcagtccttatctcaactgcataggacagacattcccagagcggccatttatagacctccccccaggaatgaattcctttcccagggtcttaatgttaatattccttgctaggaaaataatttagcaatatctctcctacttgcacgtccacttataggctctctgcaagaagaaaaatatggctctttttgcccagccccgcaggcagtcagaccttagggttgtcttcccttgttccctaaaatcactctcattctgttctttttcaatgtgcgctgatttcacattgttcaaacacacattttacaatcaatttgtacagttaacacaattatcacagggtcctgaggtgacgtacatcctcagcttatgaagataacaggattaagagatgaaagtaagacaggcgtaagaaattataagagtattatttgggaag

SEQ ID NO: 14098 - DNA, 5032 bp, Homo sapiens; identical to SEQ ID NO: 14097

SEQ ID NO: 14099 - DNA, 9579 bp, Homo sapiens
agtccaaattcagcctgtgaacccaaccacaaatccctatacttgactgttctctgagagcctcaaaccccaatgtaggcctggctgttggagatctatccctctggtcaggcccctctctgtgctgtcatgtcaccaccctgcccttgccatgccttcatcccaaggcctcccgaagccagccatcctcacgcatgagcgggtactgcagatgagcaagatgctgtccttatctggggccacagctgatgatgtggtttacacggtcctgcctctgtaccacgtgatgggacttgtcgttgggatcctcggctgcttagatctcggtaagcccacttctgaggatccctccagtctacaggaccacgggagtaagtgtcggcgtggggctgtcaaggcaaaaagacaccataggttacccagcaccctgtgttctcacttttgagaagggacacccaccaatgactaccagggccgcatggacagaagcttggacacccacacagtccctgatggccatgctttggtcaggaggtgacaagacctgatacgagtgatggtcacaggcatccaaggaaggtgtggtgctcaggagatgatggggatgctggcccagatttgtgacatggccccaagggcagctggagtaggagtgctctcaagcactccacagggctgtctctctggactcttgattcagagtctagatggggacctctccatagcttgttctttttgttttctctcttttttttttattttaatttttatttatttattttttttcgagacagagtcttgctttgtcacccaggctggagtgcagaggcatgatcttggctcactgcaacctctgcctcctgggttcaagcaattctcctgcctcatcctcctgagtaactgggattacaggcgcccaccaccacgcccggctaatttttgtagttttagtagagacgggatttcaccatcttggccaggctggtcttgaactcctgacctcgtgatccacctgccttggcctcccaaagtgctgagattacaggtgtgagccaccgcacctggctattttctctctctctctctttttttttttgagacagagtctcgctctgtcgcccaggctggagtgcggtggcatgatctcggctcactgcaagctccgccttccaggttcaagcgattttcctgcctcagcctcctgagtagctgggattacaggcacgcaccaccacgcccagctaatttttgtatttttactagagactaggtttcaccatgttggtcaggctggtctcaaactcctgaccttgtgatctgcccacatttgcgggcatttgcctcccaaagcgctgggattacaggtgtgacccaccacgcccggcctttttgtgttttccagctattatcatggccatgtgtggttgctcatgcctataatccctgcactttgggtgccaaggcaggaggatcacttgagtccaggagttcaacaccagcgtgggcaacatagtaagaggccatctgttaaaaaaaaattttaaaaagccacgcatggtggtatcgggggaacctgcccctaatatttcaatgtaggttctttttttttttttttttgagatggagtctcgctctgtcgcccaggctggagtgcagtggtgcgatctcagctcactgcaagctctgcctcctgggttcatgccattctcctgcctcagcctccccagtagctgggactacaggcgcctgccaccgcgcccggctaattttttgtatttttagtagagatggggtttcacatttagccaggatggtctcaatctcctgacctcatgatcctcccacctcggcctcccaaagtgctgggattacaggtgtgagccactgtgcccggcctcgatgtaggttctttctattttccgtaagtgctggccagctgagaaataaagagaaagagtacaaagagaggaatttgacagctgggcctccgggggtgacatcacatatcggtaggaccatgatgcccacctgagctcaaagccagcaagttttattaaggatttcagaagggaagggggtgtaagaaccgagaataggtacaaagatcacatgcttcaaagggcaaaaaacggaactactgatcagggtccaacaaagatcacaaggcaaagggcaaaagcagaactgataagggtctatgttcagtggtgcacatattgtcttgataaacatcttaaacaacagaaaacagggttcaagagcagagaactggtctgacctcaaatttaccagggcggggtttttccccaccctagtaagcctgagggtactgcaggagaccagggtgcatctcagtccttatctcaactgcataggacagacattcccagagcggccatttatagacctccccccaggaatgaattcctttcccagggtcttaatgttaatattccttgctaggaaaataatttagcaatatctctcctacttgcacgtccacttataggctctctgcaagaagaaaaatatggctctttttgcccagccccgcaggcagtcagaccttagggttgtcttcccttgttccctaaaatcactctcattctgttctttttcaatgtgcgctgatttcacattgttcaaacacacattttacaatcaatttgtacagttaacacaattatcacagggtcctgaggtgacgtacatcctcagcttatgaagataacaggattaagagatgaaagtaagacaggcgtaagaaattataagagtattatttgggaagtgataaatgtccatgttatcttcacaatttatgttcctctgccgtggctccagccggtccgtctgttaggggtccctgacttcccgcaacagtggtgagcacttgtgagcgattcttctgcctcagcatcccgagtagctgttattacaggtgcccaccactatgcccggctaatttttgaatttttagtataggtggggtctcaccatgttggccaggctggtctccaacacctgacctcatgatccacccacctcagcctcccaaagtgctgggattacaggcatgagccaccgcgcccggccaaatttttcttttttttttaattatgaaaagtttagctgtgcccggtggttcacgcctgtaatcccagcactttgggaggctgaggcgggtggatcacctgaggtcaggagttcaagacaagcctggtcaacatagtgaaatctgtctctacttaaaatacaaaaattagccagtcatggtggctcacgcctgtaatcccagcactttgggaagctgaggccactggatcacctgaaatcaggagtttgagaccagcctggccaacatggtaaaaccctgtctgtactgaaaatacaaaattagctgggcgtggtgatgcgagcctgtgtttccagctactcgggaggctgaggcaggaaaatcgcttcaacctgggaggcgggggttgcaaaaagagtgaaactcccttgcaaaaaaaaaaaaaaagtgaaaatagtttgatgacatctcatgtatcttcgcccagcatcaataattgttaacatgttgccagtttaatttcgcatatacttctctgtttcttttttgtttgtttttgagacacagtctcgctctgtcacccaggctggagtgcagtggcaccatctcagatcaccacaacctctgcctcccgggttcaagcaattctctgctgaggctgagcctcctgagtagctgggattacaggcatgcgcctccacacctggctaatgtttgtattcttagtagagacggggttttgccatgttggccaggctggtctcgaactcctgacctcaggtgatccacctacctcggcctcccaaagtgctgggattacaggcgtgaaccaccgcgcctggcgtctgtttgttttcaaacttttatcatggccaggtgtggttcctcatgcctataatccctgcactttggggtaccaaggcaggaggatcacttgagcccaggagttcaacaccagcctgggcaacatagtgagagtccatctgttaaaaaaaaaaaaaagccaggcatggtggtgagcacttgtgagcgattctcctgcctcagcctccctagtagctgttattacaggctcccaccaccgtgcctggctaacttttgtatttttagtagagacagggtttaaccatgttggccaggctggtctcgaactcctgacctcgtgatccgcccgcctcggcctcccaaagtgctgggattacaggtgtgaactaccgtgcccggccaaatgtttttttttttttttttgagtcggggtttcactattgttgcccaggatggaatgcaatggcgcgatgtcggctcactgcaacctctgcctcctgggttcaagcgattctcctgcctcagcatcccaagtagctgggattacaggcatgtgccctcacgaccggctaatttttttttatgtttttagtagagatggggtttctccatgttggtcaggcttgtctcaaactcccgacctcaggtgatccgcccacctcagcctcgcaaagtgctgggattacaggcgtgagccactgcgcccggccaaattgtttttttaattatgaaaagtttaggctgtgcccagtggtttacgcctgtaatcccagcactttgggaggatgagtctggtggatcacctgaggtcaggagttcaagatcagcctggctaacatggcaaaatccgtctctacctaaaatacaaaaattaccggggcatggtggctcacgcctgtaatcccagcactttgggaggctgaggccggcggaacacctgaagtcaggagtttgagaccagcctggccaacatggtgaaaccctgtctctactgaaaatacaaaattagctgggtatggtggtgggcgcctgtatttccagctaccagggaggctgaggcaggagaatcgcttgaacccggggcgcaggggttgcagtgagccgagatctagccattgcattccagcctgtgcaaaaagcgagactctgtctcaaaaaaaaaaaaaaaaaaaagtgaaaatagtttgatgacatctcaggtatcttcacccagcttcaataattgttaacatgctgccagtttaatttctttttttttttttctttgagatggagtctcgctctgtcgcccaggctggagtgcagtggcgcaatctctgctcacggcaagctccgcctcctgggttcatgccattctcctgcctaagtctccggagtagctgggactacaagtgaccgccaccacgcctggctattttttttgtatttttagtagagacagggtttcacggtgttcaccaggatggtctcaatctcctgacctcgtgatccgcccgcctcggcctcccaaagtgctgggattacaggcatgagccaccgcgcccagggccagtttaatttcacatgtacttccctgtttcttttttgtttgtttgtttgtttttgagacagagtctcgctctgtcgcccaggctggagtgcagtggcaccatcttgggtcaccgcaagctccgccccgcccgccccccccccccccccagggttcaatcagttttctgcctcagcctcctgaatagctgggattacaggcacgcaccgccacaagcggctaatttttgtatttttagtagagacagggtttcgccatgttggccaggctggtctcaaactcctgacctcaggtgatccacctgcctcggcctcccaaagtgctgggattacaggcgtgagccaccgtgcccagccacttccctatttttttccagaatatatcagagcaaatcctagacactgcatctttatgcttgtaaatattgcagtacatatctctaacatataagcactgaagaaactgtaaccaaagtgattattacacgtaacaacattaatatcatatgatgtccttaatatcatatgatgtaaccccttaatatcatatgatgtccagtctatgttcagatttctccaatgggctgttttggtttggttttgtttttagagacagagtcttgctttgtcacccaggctggagtacagttgtgtgatgttggctcactacaacctctgcctcctgggttcaaacgattctcatgcctcatcctcctgagcagttgtgattacaggtgtggaccaccatgcccagctaatttttttgtatttttagtaaagacagggtttcgccctgttggccagtctggtcttgaacttctggcctcaagtgatctgaacacgttggcctcccaaagtgctgagattacaggtgtgagctactgtgcccagccaattggctgtttttttgtttgtttgtttgtttgtttgtttttaacaattaaacagtctccccattgtatttgcttgtaggtctctgttcccctttcatctgcatttcttgttaaattggaaactttaactagaggtgttgttagattcagtttttttctttttcttttgagacagggtctcactctgtcacccaggctggagtgcagtggtgtaagctcggctcactacagcctccccctcctgggttcaagcgattcttccacctcagcctcccgagtagctgggactacaggtgtgcgccaccacgcctggctaatttttgcattttttggtagagatagggtttcaccatgttggctaggctggtctcaaactcctgatctttcaggtgatccacccccctcagcctcccaaagtgttgggataacaggtgtgagccaccacgcccagccccctatatcttattaatccatgtgtccatacgtcaatacaaccatacaaacattcaccaacccacccatctacctactcacctacttcctcactcattcattcattcatccacccacccatctatccatccttacacctatccatctttctctttttctttttttttttttttaagacagagtctcactctgtcgcccaggctggagtgcagtggcgctatctcggctcactgcaagctccgcctcccaggttcacgccattctcctgcctcagcctcccgagtagctgggactacaggcgcccgctaccacgcccagctaattttttgtattttcagtagagacgggtttcaccgtgttagccaggatggtcttgatctcctgacctcgtgatccgcccacctcggcctccctaagtcctgggattacaggcgtgacgatcctcacccagccacctatccatctttctacccccctgcctctgcatgtcactgtccagccatccatctactcactcactactctaactgtccacccatccatctactcactcactactctaactgtccagccatccatctactcactcactactctaactgtccacccatccatctactcactcactactctaactgtccacccatccatctactcactcactactctaactgtccacccatccatctactcactcactactctaactgttcacccatccatcttctcactcactactctgtccacacatccatcttctcactcactactctgtccacccatccatctactcactcactactctaactgtccacccatccatccactcactcactactctaactgttcacccatccatcttctcactcactactgtaactgttcacccatccatctactcactcactactctgttcacccatccatcttctcactcactactctaactgtccacacatccatcttctcactcactactctgtccacccatccatctactcactcactactctaactgtccacccatccatccactcactcactactctaactgttcacccatccatcttctcactcactactctaactgttcacccatccatctactcactcactactctgtcacccatccatctactcactcactactctaactgtccacccatccatctactcactcactactctaactgttcacccatccatctactcactcactactctgtccacccacccatctactcactcactactctaactgtccatccattcatctttccatccatccaccatatccatccacctgcccacccatctgcttagctgggcattcatttatcgtaatcaagagtgatttgagcttcgagtcagtgacaagccaaaataaaaattaaaaatgtggctgggcacagaggctcatgcctgtaatcacagcactttggaggccgaggcgggtggatcacctgaaaggtcaggagttcaagaccagcctggccaacatggtgaaaccccgtctgtacttaaaaaagtacaaaaattagccagctgtggtggcgggtgcttgtaatcccagcaactcagaaagctgaggcaggagaatcgcttgaacccgggagggagaggttgcagtgagcggagattgcaccactgcactccagcctgggcaacagagcgagactccgtctcaaaaataaaaataaaaaatttaatatttacagcccttatttagcattgctcactttataacaggcacggagctttcccggcatcctggagacaggatttgaacccaggcctgcctatgctcttctagtgagagcagtcctggctgggccaaggacacaaagatgaactcagtattgtcctgtatttcagggtgtgggggtgggtgagcacaggtgctaaaagcagcttcttacaacaatttggaagcatgacctgaaaccccctctcctgtcatctcccaggagccacctgtgttctggcccccaagttctctacttcctgcttctgggatgactgtcggcagcatggcgtgacagtgatcctgtatgtgggcgagctcctgcggtacttgtgtaacattccccaggtgaggctctaagattagggctccatggtgaacacccaagtatgaaatcccaggtaaaggtctcaggtaaagattcaggtactgaactcaagtccctcagataatacacctcatgcaagaaccccagataatgagtttcagacaaggcttccaataatggtttctttgatagctgtgctaccttgagcctcagtgtcctcatttggaaaacagggataatagcccctacccctatcatgagaatttccattaaaaattaattaattaaaattaaatttccattaaattaaagttctaggtaactactcttaggtgagaccccagatgaggcctccagtcacctctggtaacgtcccccaggcaaagctctgaggtcgcccctgcaggtaaccctctatttaagactccagtaactactctcatgtaagtaacccaggtagatcccttaggtagaggtcccccatcaccttccaggtaactcccaaggtaaggacccaggataacaccccctctaggtaaaggttccaaggcatgccccaagagcacctcctcctcacccttctggggacattcctgtagcaaccagaggaccggacacatacagtccgcctggcaatgggcaatggactacgggctgatgtgtgggagaccttccagcagcgcttcggtcctattcggatctgggaagtcta

SEQ ID NO: 14100 - DNA, 564 bp, Homo sapiens
agtccaaattcagcctgtgaacccaaccacaaatccctatacttgactgttctctgagagcctcaaaccccaatgtaggcctggctgttggagatctatccctctggtcaggcccctctctgtgctgtcatgtcaccaccctgcccttgccatgccttcatcccaaggcctcccgaagccagccatcctcacgcatgagcgggtactgcagatgagcaagatgctgtccttatctggggccacagctgatgatgtggtttacacggtcctgcctctgtaccacgtgatgggacttgtcgttgggatcctcggctgcttagatctcggagccacctgtgttctggcccccaagttctctacttcctgcttctgggatgactgtcggcagcatggcgtgacagtgatcctgtatgtgggcgagctcctgcggtacttgtgtaacattccccagcaaccagaggaccggacacatacagtccgcctggcaatgggcaatggactacgggctgatgtgtgggagaccttccagcagcgcttcggtcctattcggatctgggaagtcta

SEQ ID NO: 14101 - DNA, 943 bp, Homo sapiens
gcggggcctctccttcccgggggcgtggtcacaagcgccggctccctccttgcagatggaagggcgagaacgtgtccacgcacgaggtggagggcgtgttgtcgcaggtggacttcttgcaacaggttaacgtgtatggcgtgtgcgtgccaggtgcggagggttctcattttaaacttccaacagctttgtgggtggaggggtcgttattctgattttacaggtggggaagtgctagggcccagagaggtttagagacttgctggctctcacagccagtgagcagagctgggcgaggctggagggtcagctatgggccctcgagatgggtcagccgagagtgaccagactgctctctaggttgtgagggtaaggtgggcatggctgctgtgcagctagcccccggccagactttcgacggggagaagttgtaccagcacgttcgcgcttggctccctgcctacgctaccccccatttcatccgcatccaggtgagcccagggtggcctggtgggtgggtggaagatcatagccagggggcgggtggatgtcacagtgattggaccatggtcactgccctgcaggacgccatggaggtcaccagcacgttcaaactgatgaagacccggttggtgcgtgagggcttcaatgtggggatcgtggttgaccctctgtttgtactggacaaccgggcccagtccttccggcccctgacggcagaaatgtaccaggctgtgtgtgagggaacctggaggctctgatcacctggccaacccactggggtagggatcaaagccagccacccccaccccaacacactcggtgtccctttcatcctgggcctgtgtgaatcccagcctggccataccctcaacctcagtgggctggaaatgacagtgggccctgtagcagtggcagaataaactcagatgtgttcacagaa

SEQ ID NO: 14102 - DNA, 643 bp, Homo sapiens
gcggggcctctccttcccgggggcgtggtcacaagcgccggctccctccttgcagatggaagggcgagaacgtgtccacgcacgaggtggagggcgtgttgtcgcaggtggacttcttgcaacaggttaacgtgtatggcgtgtgcgtgccaggttgtgagggtaaggtgggcatggctgctgtgcagctagcccccggccagactttcgacggggagaagttgtaccagcacgttcgcgcttggctccctgcctacgctaccccccatttcatccgcatccaggacgccatggaggtcaccagcacgttcaaactgatgaagacccggttggtgcgtgagggcttcaatgtggggatcgtggttgaccctctgtttgtactggacaaccgggcccagtccttccggcccctgacggcagaaatgtaccaggctgtgtgtgagggaacctggaggctctgatcacctggccaacccactggggtagggatcaaagccagccacccccaccccaacacactcggtgtccctttcatcctgggcctgtgtgaatcccagcctggccataccctcaacctcagtgggctggaaatgacagtgggccctgtagcagtggcagaataaactcagatgtgttcacagaa

SEQ ID NO: 14103 - DNA, 19752 bp, Homo sapiens
cttcccgggggcgtggtcacaagcgccggctccctccttgcagatggaagggcgagaacgtgtccacgcacgaggtggagggcgtgttgtcgcaggtggacttcttgcaacaggttaacgtgtatggcgtgtgcgtgccaggtgcggagggttctcattttaaacttccaacagctttgtgggtggaggggtcgttattctgattttacaggtggggaagtgctagggcccagagaggtttagagacttgctggctctcacagccagtgagcagagctgggcgaggctggagggtcagctatgggccctcgagatgggtcagccgagagtgaccagactgctctctaggttgtgagggtaaggtgggcatggctgctgtgcagctagcccccggccagactttcgacggggagaagttgtaccagcacgttcgcgcttggctccctgcctacgctaccccccatttcatccgcatccaggtgagcccagggtggcctggtgggtgggtggaagatcatagccagggggcgggtggatgtcacagtgattggaccatggtcactgccctgcaggacgccatggaggtcaccagcacgttcaaactgatgaagacccggttggtgcgtgagggcttcaatgtggggatcgtggttgaccctctgtttgtactggacaaccgggcccagtccttccggcccctgacggcagaaatgtaccaggctgtgtgtgagggaacctggaggctctgatcacctggccaacccactggggtagggatcaaagccagccacccccaccccaacacactcggtgtccctttcatcctgggcctgtgtgaatcccagcctggccataccctcaacctcagtgggctggaaatgacagtgggccctgtagcagtggcagaataaactcagatgtgttcacagaagtctgtatgtctgcgtggatgaaggagcaatggaggagtgcaggggctagtgccctgaagaccttattttagggtcttccctgtctcccagcaaagaacctcagccatccctgtgggatgaccctgtctgtgtaacgccaagggtgtgggaggagctggccagcctcgcagctgctctgaggtagagagatgagaactctgattctcatctgtgggtctttggtgggccactgaggcggtggctgggccagtggatgtggataactcccctgtgaagtgctgtggatacacaatctgacaaagcctggaggttgctggactgaggctagaagggcaagcaggaggtaactgggggaggagtgtccctggcactgtgaacggcacgtgtagaggccctggggcaagctttgtaggtggggagcagtgggagcagaggcctctggaaaatgggagtctgcacagtctcaggagttggacctgctacccgaagcctagtggagatgtaggtgggggtgtgtgggtgctgagcctctgcctccaaggcttctcggcccagtaggaactgaaggtgaggctacagacactggaacagttgtggtggtgccaggccggtggtccatgggttaactttgggagcacagctggggtgatgatggtgagaaaaggaaccccacagcagtaaacgccatatgcaaagggctgtccgtgggcagtgctgcagactgcgaccctgcccatcccttctcgtgtgcatagtaaacacaccccacagcaatgcttaagcacacctgagaatggccctgtgtggcagacgcacctgagtgtggttcagagttcccagctaaggaatctcagagattcattccttatttttgaggaacatctgggtccttagccctgtcccatggaatgctggtggtataagggatcctggccttttgctttcagttaaatgaaggttgccagggggaggatgttaagtgaaaatgccatataaactgcatgctttttgcaagtggttctcctgcccagcccaccgcccctggactctccccggtatgtaagcccccagtaaaaccctacatcttgtttgctggctcttagtctcttcttcggcctcttgaacctggtgccgtccccattggagtcagtaggggtttggcacaatactgtgctctcccgtgcctcagcctcctcatcaggctatgggccactttgagacagaactagccttcgaagggagcagtgcaggcagcaccccacgtgggctgtgaggcagctgggcttcacagagttcctggtagcattcgaggctcttcctgtcagccctgcagcctggagctgagacagtatccttttcagttggggtcccactatgagcatctgtttgtcattggtggtggccgtgcactgtaattctcttctgcgaagtgatagttgttgtgacttgctatttctgtgccctgtgtggccagtggagccccacatgttccctgaagagccctggccctttcatacaactggacttggatcctcccacgcacacagtaggttgtccagttccttcatactcctccagcctgggtgacagagtgagactccgtctcaaaaaaaaaaaaaaaaaaaaaaaagaaccctcacgtccttgttagtatagtgggaaaaaaagaagaataacccttgtggactcacctggggccaggctagagctgatactttttttttttttgagacagagtctcgctctatcaccgaggctgtggtgcaatggtgcaatctcagctcactgcaagctccgcctcccgggttcatgccactctcctgcctcagcctcctgagtagctgggactacaggtgcccgccaccacgcccggctttctttttgtatttttagtagagagggggtttcaccgtgttagccaggatggtctagatctcctgacctcatgatcctcccacctcggcctcccagagtgctgggattacaggtgtgagccactgtgcctggcctagagctgatatcttcaccacatctcatgggatgagttgtgttgtgttgctcccaccatagttgaggaagccccagccaagagaggtgctttccccatgagttacttgccaagcccattgttgcaggtgttggatcagagggtgtggatgttgtagaaatatctcactgtggatcctcagctttacaagttcaccagcactttatacaaatccgtgcctccctaagccctagctagcttggggcattcatagtttttgctattacatttgcaaggattaaaaaataatatttgattagctgggtgtggtggtatgcacctgtaatcccagctactcaggaggctgaagcaggagaatcgcttgaacttgggaggtggaggttgtagtgagccaagattgcaccactgcactccactttaggcaacagagctgagagtctgtctcaaaataataataataatttttgaggctgggtgcagtggctgacgcctgtaatcccagcactttgggaagccgaggtgagtggatcatgaggtcaggagtttgagaccagcctggccaacatagtgaaaccccgtctctactaaaaatacaaaaaattagccaggtgtggtggtgcatgcctgtaatcccagctactcaggaggctgaggcaggagaatcacttgaactcagaaggtaaaagttgcagtgagctgagatggcgccattgcactgcagcctgggtgacagggcaagactccgtctcagaaaaaataaataggcgggcgcggtggctcaggcctgaaatcccagcactttgggaggccaaggtgggtggatcatgaggtcaagagatcgagaccagcctggccaacatggtgaaaccccgtctctactaaaaatacaaaaaattagctgggtgtggtggcggatgcctgtagtcccagctactcgggagggtgaggcaggagaatctcttgagctggggaggcagaggttgcagtgagctgagattgcaccactacactccagcctggcgacagagcgagactccgtctcaaaaaataaaataaaaataaataaataaataaatttaaataataatataatttttggctgggtgcagtggctcatgcttgtaatcctagcactttgggaggccagggtcggaggaccacttcaccctaggaggtcaagatcagcctgggcaacatagtgagaccacgtctctagaaaaaaaattaaaagtaaaaaaattagccaggagtggtattgtgcacctttagtcctagctactgggcaggctgaggcaggaggatggcttaagcccaggagtttgaggtaacagtgagctatcattgtgctgctgcactccatccagcctgggcaacagaggcaggaccctgtctctaaaataaataaaaattttaaaactttttcttattcccccactagactacagatctatgaagtgttttttattcaatatatcacacacgttattccttttctcttttactttccaaacaattttatttaaaaaaaacctgcagtacagtattaaaaagcaatacattcagcaggagtgacaaccaacagaaacaaagggaggagggtacggaataccagggaccctacctcaactgatcctcagggctggaggccaggggcagactgggaggagcacgggtggtggggaagggagaaaagggcacccaccaaaatgaacaggcagaacaaaacatttatataggaaatgtctagttgaacttgaggatcttggggagacggaaaagcaccttttttttttttttccaaaaatatcctggactatcagggagggttggcctcctggggcgaaatgagcaggcagagccctaccctacactctactattgtggaggggatgtgctgggggctggtgacacacattttattcttctttttttttttttttttttttgagatggagtctcactcttgttgcctaggctggagtgcagtggcactatcttggctcactgcaaactccgcctcccggaaccaagtgattctcctgcctcagcctcctgagtagctgggattacaggcacacactaccacacctgactaatttttgtatttttagtagagacggggtttcaccatcttgaccaggctggtcttgaactcttgacctcgtgatccacccacgtcggcctcccaaagtgctggggttacaggtgtgagccactgcacccttttttttttttttttttgagacgtagtctcactctgtcacccaggctggagtacagttgcacaatctgggctcactgcaacctctgcctcccaggttcaagtgatgctcctgtctcagcctcctgagtaggtgggattacaggcatgtgccaccaggctcagctaatttttgcatttttttggtagagatggggtttcactatgttggccaggctggtctcgaactcctgacctcaggtgatctgcccgccttggcctcccaacgtgctgggatgacaggcgtgagccaccacacccagcgtattcttaatttcattctataagtctttctgtttctcctgtcccaagctgctgtaattagcataggcttgtaatatatatatatatatatatatatatatatatatatattttttttttttttttttttttctttttctttctctctttttttttttttttttttttttttgagaaggagtctctctctgttgtccaagctggagtgcagtggcttgatctcagttcaccgcaacctctgcctcccaagttgaagcgattcccccacctcagcctcctgagtagctgggattataggtgtatgccgccactcctggctaatttttgtatttttagtagagatggagtttcaccatgttggccgggctggtctcgaacccctgacctcaggtgatccacctgcctcggcctcccaaagtgctgggattacaggtgtgagccactgcacctggcggaattcctactctttacttttatttcaaaaccttcttagctagtcatgtgtcagaactctttcccatttatgtcttttccccccaaaattgctggttaggtatagaagtaaaaggtggtggagggcaccatgctttctttatattcttatgggtggctgctagtgtggggactggtttttttgtttttttttttcttttttgagatagggtctcgctctgtcacccaggctggagtgcagtggcaccatcatcgctcactgcacccttgacctcctaggctcaagtgatcccccccagtagctggggctgcaggcatgcaccatcatgccttgctaattaaaaaaaacatattttcttttgtagagttgggatcttactgtgttacccaggctggtctcgaactcctgggcttaagcgatcgtcttgcttcagcttcccaaagtgctgggattataggagtgattcactgtcctaggaaggattgtttctttctttctttcttcctttttttttttttttttttttttttttgagatggagtctagctctgtctcccaggctggagtgcagtggcgcaatctcggctcactgcaagctccgcctcccaggttcacgccattctcctgcctcagcctcctgagtagctgggactacaggcgcccgccaccacgcctggctaatttttttttttttgtattttttagtacagacgaggtttcaccgtgttacccaggatggtctcgatctcttgacctcgtgatccgccccccccttagcctcccagagtgctgggattacaggcgtgagccactgtgcccggccccaggaaggattcttgaagtatcggtggatgccctcatgggaggaccagtgactctcacgaaaagcagcctttgttgtccaagtgaataaataatgcctttcatgtaagcatgtgagaaatacaggcagatgctgtagcgatggctcagatggtgacgtttcttacagactttaccaagtccacggtttcttctcatcctgccttttcctggatgcccgtgttaagttccccgctcccacccctaatgacagatgacttctcccaccgactttccgtatccgacattatgctctcgggtttgatggttcaagatgactttttctctatgaatgaataagtcaatgatgattaacagtggtggtaatgagaggtacctcctcacacagatccctctctgccttgctagaacttgccttaccctggtgagggtgctctgaaaaggcatggacgtggctgctggtcctgcctctggacccacagtgactagggtctctctgttttctgacatgtccagggagggctgggcagagcctcatgggttagaggtgtgggtcacgtctctgctgtccatgctgggagtgagtcattgacaagagggccatggagagggccttttcggaagggcggttggaaggaaccttctggaagggtggcgtggtgatcgtagcctgagaggctggatatgaggaaatagcaggtgtggcaggagggggattcttagggcccatctggtgctggggagtaggactgacagacctggtccagacaggccagcaggaagtcaagactgaagagagggttccagagacctggggaggggtcaaaaagtgagataagtggggcacccacagaaggagagatggtcttggagctcacaagcagcggcgggcaccaatgtctgtgcagtcatgttcagacactgttggtgttgccgagaccacggaaaacacaagccctgtgtgaaagtgaactgacccccacaccatgcccagtgccctttggcatctgctgtagtaggaggaggctgcagcctgtgcaaaccccaggaaggggctcgattcttgcagatggcaccaactacagaggaatggagctggtgatggacactggtaggcaggacttctcaagtatggttccaggtgataaacggggctgtgtggatgaacatctattaatgtagacattatctattttaaggtgacttgaaatactgtttattttattattgcaagatgtggaaatttactttaaaataaatgtatggggccgggagtggtggctcacgcctgtaatcccaacactttggtaaggtgaggcagacagatcccttgaggccaggagtttgagaccagcccggccaacagggcaaaaccccatctctactaaaaatataaaaattagccgggcgtggtggcctgtgcttgtaatcccagctacttgggagtctgaggcaggagaattgcttgaatctgggaggtggaagtcgcgctgagccaagatcatgccactgcactccagcctgggcgacacagcaagactctgtctcaaaaaaaataaaaataggcatttctctttttttgagacagagtcttgctctgttgctcaggatggagtgcagtggcatgatctcagctcactgcaacctccacctcccaggttcaagcgattctcctgcctcagcctcctgagtagctgggattgcaggcgtccaccaccacgcctggctaatttttttatttttagtagagatggggtttcaccatgttggccaggatggtctcgatctcctgacctcgtgatccacccgcctcgacctcccaaagtgctgggattacaggcgtgagccactgcgcttggcctaatttttgtattttttttttccaagatggagtcttgctctgtcacgcaggctagggtgcagtggcatgatctcggctcactgcaacttccgcctcccgggttcaagcaattctcctgcctcagcctcccaagtagctgggattacaggcacgtgccaccatgcccggctaatttttgtatttttagcggaaatgagtttttgccctgttggccaggctggtctcaaattatagatcttgggtgatccgaccacctcgggtgatccgactgcctcggcctttcaaagtgctgggattacaggtgtgagccactatgcccgccaagagctccatgttttaaaagggatcatgtagctagatcagcccccccacacccccagataatcatatagtctattttaagttcaactatggggccaggtatggtggctcatgcctataatctgagagctttggaaggctgaggcaggaggatgacttgaggccagaaatttgagaccatcctggacagcacagcaagactctgtctcaaaaaaaaaaaaaaaaaaaaaaggcgaggtctggtggcacgtgcctgttgtcctagctactggggaggctgaagtgggagggtcacttgagcccaggagttctaggttgcagggagctatgactctaccactttgctccagcctgggtgacagagtgagattgtctcaagaaaacaaaactacggctggtgcggtggctcatgcctgtaatcccagcactttgagaggccaaggccaggagttcaagaccagcctggccaacatggtgaaaccccacctctgctaaaaatacaaaaattagccaggcgtggtggcgtgggcctgtactccagcttcttgggaggctgaggcacaagaattgcttgaacctgggaggcggaggttgcagtcagccgagatcgcgccaccacactccagtttgagtgacagcaagactgtcaaaaagaaaaaagggcaaccatgccatgtgacacaatcatatcacaggattggtagcgtaactgcccagtgggttcacctttcctgctgcctggacacagctgatttctcaagacgggggaattacagtagagaaagggtaattcacgcagagccagctgtgcgggagacaagggttttgttatcactcagatcagtctccctgagcattcagggagcagagtttttaaggacaacttggtgggttgggggaagccagtgagccaggagtgctgattggtcagggatgagatcatacagagtcgaagctgtcgtcttgcgcggagtcagttcctgggggccacaagatcagatgagccattttatggatctgggtggggccagctgatccatcaagtgcagagtctgcaaaatatcccaagcgctgatcttaggagcagttgagggagggtcagaatcttctagcctccagctgcgtgactcctaaaccagagtttctaatcttggggctaatgttagtcctacaaaggccatctggtccccaggcaagaaggaggtctgctttgggaaagggctgttatcctctgtgttttaaactataaaccataaggttatgaactataagtttctctcaaagttacttcagcctatgcccaagaatgaactaggacagcttagaggttagaagcaagatggaattgatttagtcagatctctttcactgtcttagtcataattttgcaaaggcagtttcagtagctcatcatatgcacaggtcctggtattcatttcctcaccaatacctgctattggcactttgtatttttttgttttttttttttttttgacggagtcttgctctgtcacccaggctggagtgcagtggcgtgatcttggctcaccgcaagctccacctcctgggttcacgccattctcctgcctcagcctcccaagtagctgggactacaggtgcctgctaccaagctcggctaattttttgtatttttagtagagacggggttccaccatgttagccaggatggtctcaatctcctgacctcatgatccacctgcctcggcctcccaaagtgctgggattacaggtgtgagccaccgcacccagcctttttttttttttttttatcatagtcatgtttatgccttttcttttaattggcagggtttttaacttgctattttgaaggctgagaaatccatcacgttatattgatgtgtatctggtttgttgacaatgctacgaataccaaccagtgctatgaacagggtgtgtggccacgagcaaggcaggtgaagccctgtcctcacagtgccatgaacaaggtgtgtggccacgagcaaggcaggtgaagccctgccctcacagtgccatgaacagggtgtgtggccacgagcaaggcaggtgaagccctgtcctcacagtgccatgaacagggtgtgtggccacgagcaaggcaggtgaagacctgtcctcacagtgccatgaacagggtgtgtggtcacgggcaaggcaggtgaagtcctgccctcacagtgccatgaacagggtgtgtggtcacgggcaaggcaggtgaagtcctgccctcacagtgccatgaacagggtgtgtggtcacgggcaaggcaggtgaagtcctgccctcacagtgccatgaacagggtgtgtggccatgagcaaggcaggtgaagccctgtcctcacagtgctggggtttctctgattactgctaggcatgtaatgctaagcatattttctttctggtctatcagcctagtttcttctgatgtgtattcctgccttatggcctttctccatgtttctatcatattttagtcctattcatatttatttgtagttaatttgttttttgagatagagtcttgctctgttgcccaggctggagtacagtggcgtgatctcggctcactgcaacctccacctcctgggttgatgagattctcctgtctcagcctcctgagtagctgggattacaggcgcccaccatcacggctggctaatttttatatttttagtagagacggggttttaccatgttggccaggctggtcttgaactcctgacctcaagtgatccccctgcctcgacctcccaaagtgctgggattacaggcgtgagccaccgcgcctggacttatttggagtttaaaaataccttctgggtttgtcgagggtttttttggtttatgttttcctccaatattttgcttatcttttatttatgtttacagtgtcttttcagagatttaagttcgatttattaaacttgccagttgtttctttagtcgtgaggcagagatggacagattgctcgagactaggagttccgggttgcagtgacctatggtttcaccactgcactgcagcctgggcaacaaatgagaccctgtctcaacaaaacaaagcaaaacaaaacaagggcaactatgccatatgacatcatcaaatcacaggagtgataactcatcaaattcacaggtcctgttctgtgctgcctaaccaatacttgttattggcagggttttaggggtctgtatactttttgtgttattatttaagaaatcattttcggccaggcgcagtggctcacgcctgtaatcccagcactttgggaggccgaggtggacggatcacaaggtcagaccatcctggctaacacggtgaaaccccgtctctactaaaatacaaaaattagctgggtgtggtggcgggcacctgtagtcccagctactcaggaggctgaggcaggagaatggcgtgaacccaggaggcggagcttgcagtgagccaagatcgcaccactgcactctagcccgggcgacagagtgagactccgtctcaaaaaaataaaaagaagaaatcattttcaactcttgaggtcataaaatttttactttcagcctgggcaacatggcgagacctcatctctccccgcccccccccaaaaaaaaaagctgggtgcggtggctcacgcctgtaatcccagcactttggggaggccgaggtgggcggatcacctgaggtcaggagtttgagaccagcctggccaacatggtgaaaccccgcctctactaaaaatacaaaaattagccgggtgcggtggcgggggcctgtaatcccagctactcgggaggctgaggcaggagaatcgcttgaacccaggaggcggaggttgcagtgagccgagattaccccattgcactccagcttggggaataagagcgagacttcgtctcaaaaaacaaacaaacaaaaactgaaagttagctgagtgtgggccaggaatggtgggtcatgcctgcaatcccagcactttgggaggccgaggtggatcacgaggtcaggagattgagaccatcctggctaacatggtgaaaccccatctactaaaaatacaaaaagtagccaggcgtggtggcacgtgcctgtagtctcagctatcgggaggctgatgcaggagaatcacttgaacccatgagtcggaggttgcagtgagccgagatcacaccactgcattccagcctgggtgacagagtaagactccatctcaaaaaaaaaaaaaaaaaaaaaaagaaagttagctgagtgtggtggcatgtgcctgtggtcccagctactcaggaggctgaggtgagaggactgcttgtgcccaggaggtcaaggctgcagtgagccatgttcacactacacttcaccccgggtgacagagcgagactctgtctcaaaacaaacaaaaacaaaacaaagttttacattttcctgatatttaaaaataaatatcaggctgggtgtggtggctcagcctgtaatcccagcaatttgagaagtagagaagggaggattgcttgaggctaggagtttgacactaggctgagcaacatattgagaccctgtctctaccaaaaaaaaatttaataaatcattaaaaatatcctagtatttaatctggaatttaattttgagtgtgtgtaaagtggaaatctgttttcttttgtatgggggagttcagttttctccaatattcagtgaacatccaccctgtcttcactgattggttgagtcatttcatgtatatcaagttccaaaaggtctgttcctagattgacctagttgtccactcctgtgccaataccacaatattttatttttttgagatggagtctcactctgtcacccaggctggagtgcagtggcatgatctcagctcactgcaatctctgccttctgggttcaagtgattctcttgtctcagcctcccgagtagctgggattacaggcgtgtgccactatacccggctaatttttttttttttttgtatttttagtagagacgggctttcaccatgttggccaggctagtcttgaactccaacctcaggtgatccacccgcctcggcctcccaaagtgctgggattatacacatgagccaccgtgcccagccaccacactattttaatattatataacttaacagtgtttttatttacaatatgacaattcttccctacttgtcgttttttccaaattgtcttagcaattcttggacttttccacatgcattttagaatctttttgttggatcatataaaatgtgcttctttttatttttctgagacagggtctcactctgttgctccggctggcacgatcatggctcactgcagcctctgcctcccaaggctcaggtgatcctcctgcctcagcctcccgagtagttgggacaacaggcgtgcaccaccacacctggctaatttttgtatttttactagagatggagtttcaccatgttgcccaagctggtcttgaattcctgggctcaagcaatctccctgccttggcctcccaaagtgctggaattacaggagtgaaccactgcacccggctgaaatgtggtatattttatttgcatttcatttactttatagattaacttggggaaaattggctgattggtttttaaaattttttaaaaaaaattttatcgaaaaaaagtagagacatggtcttgctatgttgcccaggctggtcttgaactcttgggctcaagcagtccgcccgcctttgcctcccaaagtgctgggcttacaggtgtgagccaccacatgggggaaggggccatgagctacagaacaattttccccctagtgtttacagaaggaatgcagccctgccaacactttttttttttttttttgagatggagtctcgccctgttgcccaggctggagtgcagtcgtgagatcttggctcactgtagcctcaacctcctggactcaagtgatcctcctgcctcagccttccaagtagctgggactacaggtgtgcactaccacacccagctaaaaaaattttttttaattgtgtgtttttttttttttttttttttttagagatggggtctcactctgttgcccaggctggtctcaaagtcttggcctcaagtgatcctcctgcctcagcctctcaaagtgctgggattacaggagtgaaccactgtgcccagccattgccaacactctagtattagcttggtgagatggtgtctaacttccggtctccagaattgtacaataagtttttgctgttttaaggcaaaaataaatctcatgttccctgtaactcaccaatcccattttgagaaatttatactacagaaatagccacagtagtatccaagtgtttactcaagagaattaatcatagcactgggtactgcagggtgaggagggaacaagaaattctttggtcttggtagaaatgatggtgccagccagaaaatagattcatccaggcatgaaaagaaaaaagttaactgctcgctcacttctatagtacatacactaaaattggaatgattagaatggcccctgtgcaagggtaaacacaaatttgtgaagcattccatatggtggggtcatccctctcctattgtgaatatttgcagttatttcatccatcatccctctctctgacctacccttccgtctcccatttccgtattttttttttccagacagggtctcatcctgttgcccaggctggagtgcaatggtgttatcagagctcactgcagccttaacctcctgggctcaagtgattctcccacctcagtctccctgggactacaggtatgcgccactatgcctggctaattagtagtagtattatttttgagacagggtctcgctttgtcacccaggctgcagtgcagtggcgccgtcttggcccactgcagctctgcctcccgggttcaagtgattcttattcctcagcctcccaagtaactgggactacaggtgcatgtcaccatacctggctaatttttgtattttttttagtacagttgaggtttcaccatgttggccaggctggtgtcgaactccaagtggtccacctgccttggtctcccaaagtgctgggaatataggcatgagccaccacacccagcctactattatttttaatttttttttttttttggagacaaggtctcactatgttgcccagattggtcttgaactcgtggtctcccaaagtgaaacaacataagttgccttaaaagaaactttacattcaaccacttctatatgtaaacttctggagtaagcattgccatgagacagttgaattagggaacattttcatgatcttctttgccatcttgtgtatttcaaatttttctaagtgagcataaattgcttctaaatgtgaaaaagtttatttaaaaactgccctcaccccctgcagcttttcttgcatgatctggccctttcacagccttctataccctgactctcccttctgggctggggcctagctggagcccctgggtactgctctgtcttcttcttctctgtccccagcacagctctcgcctcctgcttgctcacagatcacccacccccagctccatctccaaactggccctgcttccggagccctgcacatgggagcaacgggttagaaggccctcataaaaggggatggggaagatgggcctctgaggagagcctccctctcccagcttcaggccgcagcagggttcctgcccctcccagggagcccctcctggggtaaccacagtcgcagctaccctcaacatccacctgcgacttgtgcacatgctgcacataccagcagctggcgagggctccttccgagagggcacccatttcctgaaaccatcccctgtgaaaatgccccttgttttcagagtaggaaggagaagagtgctgaatcaaggcccccaaggagtccccattccaatccccagaagctgtgaacatctcaattggcaaaagggactctgcggtgtgactaagtgtgcaggtaggggacaagatatgatgagggtccttaaggaggccaaaggatcgatgggtgtcagagagctggcagcctaaggaagacgtgaccaaccatggctggctttgaagacggaggaatggaccaagaaaaaaaaaagggggaacgtgggctgactctagaagctggaaaaggcaacaaaatggattattctctcctagagccttcaagaggaaccagtcctgttaaaaccttgattttggccgggcgcggtggctcacgcctgtaatcccagcactttgggaggccgaggtgggtggatcacgaggtcaggagatcgagaccatcctggctaacacggtgaaaccccgtctctactaaaaatgcaaaaaaattagccgggcgtggtggcgggtgtctgtagtcccagctactcaggaggttgaggcaggagaatggcgtgaacccgggaggcagagcttgcagtgagccgagattgtgccaccgcactgcagcctgggcaactgagcgagactccatctcagacaaaacaaaacaaaacaaaacaaaacaaaaccttgattttagcccagtgggacccatgtcagagttctgaccttcagagctataagagaatctgttgtttcaagctgccaagtttgttaaagcagcaacagaaaactaatacagtgcattggcgagtccccagtgactgcccagagatccggtgcttcccagggagctgaccttttgccttcctgctgcatgaccagctaactatggagggtgcggcctgacctagaagtacccatggccttggcgcaacccctgcttgcagcccctcttctcagaggtcccccttgtccagccgtacttcgaaaggaaatcccctttgtgtctctcaagccgggactgatgagttccaaggccagtgaggctggtgagtgatgtgggcggcaaggagcaagggaggctggggacctgggacctgggttctgtggcaacagaggtttggccgttctgggctcaactgccctgtgctgcagctactgggcagagacagcaaactgcctatttcccgaccagcagaagccagaaatcaggattcttattcagaaactccatattatgaaagtggaatttatgttaaaattctaacacacacagggagcaggagaaacggaagccaactgtgctttcctgggtcttctgctgctctccacactgagacctcaggcccagcctctgcacagacgagtgggaaggcacagtttttgaacacccacctgaggcaaggaggtcccaggagagggagtgttgtcagcccaggccatgtcacagggagggagggagcctggtgcttggcagtcaccccacaggcactggtcagccatagaagggaacccagacctccctctaggaggcaggggcaagaagagagagagcagctccttttccttgcacccaggtcttttgggggagaccagaccaggggcagggaactggcttgggaccccttgttcactctggcatcccctgctgcctccagagtcttctgctggtgccccagaggctgtatccaggccccgagaacaccgaggccccgagggactgtgctgtctggctgctcatggaacctccggccggtggcccttgcggtggatgaccagctgcgacttccagtcgaaggcgcggccacagtcactgcagaagtgacgccgctggcctgtgtggctcttgcggtggatgaccagctgcgacttccagctgaagctgcacccgcactcctcacacgggtaactccgggggcctgtgagtgagcgtcgggggtggtgcggaaaggccacctccccttgtggtggcttctctgtgctttccccggtggctagccccggggactgcacacctggcccactcgtgtgtgtccggtggtggatgacgaacactgacttccagtcgaagccgcggccacactgctcgcacgtgtagggcttcctgggggtggcagccggctccagtctcgtctctgcaggtgtgggctgagtgggcactggcggtgtccctgggcgcacagtgggggcaggagtggcagccccagacaagccctcccaggctgccggccctgggccctggggcggctgggcctctgggcagccaggtggaccctcactctcatttcctgggggcaggggcaaaccaggtgagtcccggcactcagcaacccctccctcaggcttgtggccgtggcacaagctcccgtccccccatgagtgggtggctcaggtcccaccgatacaggaggggtgattcaggctggatggtgtggggcactcacccgagcgcaggcttctgcagacgcctgtccccgtgagcagcatccccagctctgactgggcctgtgcctctggctggtggggcggtaaccctgcccgggtggggggcacagttaggcatggggtttgcatgaaggaggggtggggtcggttctggtaggtgacagggtgttcctctggaaggtgggagagctgggtagggctggtagcacagaggccctgcccagctaggcctgctgcagggtgggtgcaggccccagggagaggggcggggtggggctggctggtcctcacccagggagaccactgtgccgtacttctccagcatcgcatcccagtacagttccttctgtgaccggtccagcagcccccactcctcctgcggatgtggcccatcactgtaggcgtctttccaccccttccctgccctgtctggttcacattcttacctattacccggaagagtcagcaggttacctacgcctcatctgcccctcctgctgagaatga

SEQ ID NO: 14104 - DNA, 2003 bp, Homo sapiens
cttcccgggggcgtggtcacaagcgccggctccctccttgcagatggaagggcgagaacgtgtccacgcacgaggtggagggcgtgttgtcgcaggtggacttcttgcaacaggttaacgtgtatggcgtgtgcgtgccaggttgtgagggtaaggtgggcatggctgctgtgcagctagcccccggccagactttcgacggggagaagttgtaccagcacgttcgcgcttggctccctgcctacgctaccccccatttcatccgcatccaggacgccatggaggtcaccagcacgttcaaactgatgaagacccggttggtgcgtgagggcttcaatgtggggatcgtggttgaccctctgtttgtactggacaaccgggcccagtccttccggcccctgacggcagaaatgtaccaggctgtgtgtgagggaacctggaggctctgatcacctggccaacccactgggacagggtctcatcctgttgcccaggctggagtgcaatggtgttatcagagctcactgcagccttaacctcctgggctcaagtgattctcccacctcagtctccctgggactacagggagcaggagaaacggaagccaactgtgctttcctgggtcttctgctgctctccacactgagacctcaggcccagcctctgcacagacgagtgggaaggcacagtttttgaacacccacctgagagtcttctgctggtgccccagaggctgtatccaggccccgagaacaccgaggccccgagggactgtgctgtctggctgctcatggaacctccggccggtggcccttgcggtggatgaccagctgcgacttccagtcgaaggcgcggccacagtcactgcagaagtgacgccgctggcctgtgtggctcttgcggtggatgaccagctgcgacttccagctgaagctgcacccgcactcctcacacgggtaactccgggggcctgtgagtgagcgtcgggggtggtgcggaaaggccacctccccttgtggtggcttctctgtgctttccccggtggctagccccggggactgcacacctggcccactcgtgtgtgtccggtggtggatgacgaacactgacttccagtcgaagccgcggccacactgctcgcacgtgtagggcttcctgggggtggcagccggctccagtctcgtctctgcaggtgtgggctgagtgggcactggcggtgtccctgggcgcacagtgggggcaggagtggcagccccagacaagccctcccaggctgccggccctgggccctggggcggctgggcctctgggcagccaggtggaccctcactctcatttcctgggggcaggggcaaaccaggtgagtcccggcactcagcaacccctccctcaggcttgtggccgtggcacaagctcccgtccccccatgagtgggtggctcaggtcccaccgatacaggaggggtgattcaggctggatggtgtggggcactcacccgagcgcaggcttctgcagacgcctgtccccgtgagcagcatccccagctctgactgggcctgtgcctctggctggtggggcggtaaccctgcccgggtggggggcacagttaggcatggggtttgcatgaaggaggggtggggtcggttctggtaggtgacagggtgttcctctggaaggtgggagagctgggtagggctggtagcacagaggccctgcccagctaggcctgctgcagggtgggtgcaggccccagggagaggggcggggtggggctggctggtcctcacccagggagaccactgtgccgtacttctccagcatcgcatcccagtacagttccttctgtgaccggtccagcagcccccactcctcctgcggatgtggcccatcactgtaggcgtctttccaccccttccctgccctgtctggttcacattcttacctattacccggaagagtcagcaggttacctacgcctcatctgcccctcctgctgagaatga

SEQ ID NO: 14105 - DNA, 905 bp, Homo sapiens
gcgccggctccctccttgcagatggaagggcgagaacgtgtccacgcacgaggtggagggcgtgttgtcgcaggtggacttcttgcaacaggttaacgtgtatggcgtgtgcgtgccaggtgcggagggttctcattttaaacttccaacagctttgtgggtggaggggtcgttattctgattttacaggtggggaagtgctagggcccagagaggtttagagacttgctggctctcacagccagtgagcagagctgggcgaggctggagggtcagctatgggccctcgagatgggtcagccgagagtgaccagactgctctctaggttgtgagggtaaggtgggcatggctgctgtgcagctagcccccggccagactttcgacggggagaagttgtaccagcacgttcgcgcttggctccctgcctacgctaccccccatttcatccgcatccaggtgagcccagggtggcctggtgggtgggtggaagatcatagccagggggcgggtggatgtcacagtgattggaccatggtcactgccctgcaggacgccatggaggtcaccagcacgttcaaactgatgaagacccggttggtgcgtgagggcttcaatgtggggatcgtggttgaccctctgtttgtactggacaaccgggcccagtccttccggcccctgacggcagaaatgtaccaggctgtgtgtgagggaacctggaggctctgatcacctggccaacccactggggtagggatcaaagccagccacccccaccccaacacactcggtgtccctttcatcctgggcctgtgtgaatcccagcctggccataccctcaacctcagtgggctggaaatgacagtgggccctgtagcagtggcagaataaactcagatgtgttcac

SEQ ID NO: 14106 - DNA, 474 bp, Homo sapiens
gcgccggctccctccttgcagatggaagggcgagaacgtgtccacgcacgaggtggagggcgtgttgtcgcaggtggacttcttgcaacaggttaacgtgtatggcgtgtgcgtgccaggacgccatggaggtcaccagcacgttcaaactgatgaagacccggttggtgcgtgagggcttcaatgtggggatcgtggttgaccctctgtttgtactggacaaccgggcccagtccttccggcccctgacggcagaaatgtaccaggctgtgtgtgagggaacctggaggctctgatcacctggccaacccactggggtagggatcaaagccagccacccccaccccaacacactcggtgtccctttcatcctgggcctgtgtgaatcccagcctggccataccctcaacctcagtgggctggaaatgacagtgggccctgtagcagtggcagaataaactcagatgtgttcac

SEQ ID NO: 14107 - DNA, 13607 bp, Homo sapiens
actccacagctgctgctcctagggaggagctggtaccatgggtgtcaggcaacagttggccttgctgctgctgctgctgctcctgctctggggcctggggcagccagtgtggccagtcgctgtggccttgaccctgcgctggctcctgggggatcccacatgttgcgtgctacttgggctggccatgttagcacggccctggctcggcccctgggtgccccatgggctgagcctggcagctgcggccctggcactaaccctcctgccagcacggctgcccccaggactacgctggctgccggctgatgtgatcttcttggccaagatcctccacctgggcctgaagatcaggggatgcttgagccggcagccgcctgacacctttgtagatgccttcgagcggcgagcacgagcgcagcctggcagggcactcttggtgtggacggggcctggggccggctcagtcacctttggtgagctggatgcccgggcctgccaggcggcatgggccctgaaggctgagctgggtgaccctgcgagcctgtgtgccggggagcctactgccctccttgtgctggcttcccaggccgttccagccctgtgtatgtggctggggctggccaagctgggctgcccaacagcctggatcaacccgcatggccgggggatgcccctggcgcactctgtgctgagctctggggcccgggtgctggtggtggacccaggtgagggccttggagccagtggagaatggaagggggcaagggcagggactataggacaggggttctgctgggactggcagaggcccttggtccccacctgcctactttcacaggcaattataatcaagacttatgagcagaaagtagttctcaggtcatcagagtttaattttcccacaatttgaccaaaaatactaatgatgggattctttaccaaacaacatggatgcttttctctactagctgctcctctgcctgcatctgtgggtctcagatcccgcctcgcaacctcaaaggtgagccttgcctctgtttctcctctgacccatctctgcagacctccgggagagcctggaggagatccttcccaagctgcaggctgagaacatccgctgcttctacctcagccatacctcccctacaccaggggtgggggctctgggggctgccctggatgcagcgccctcccacccagtgcctgctgacctgcgtgctgggatcacatggagaagccctgccctcttcatctatacctcggggaccactggtgagggtgcccattagccctagcaccagcctctgaactctcaggctgacctgaccccacacttgacttgtgactcagtgttgacctctgaaaccactttaccctctgattttgacatttgttttttgtttggctgttttttttttcgaggcagagtctcgctctgtcgcctaggctggactgcagtggtgcaatctcggctcactgcaacctccacctcctgggttcaagcaattctcttgcctcagcctcctgagtagctgggattacaggcacacaccactatgcccagctaatttttgtatttttggtagagacagggtttccccaagttagccaggctggtctctaacccctgacctcaggggacctgcccaactcagcctctcaaaatgctgggattacaggcgtgagccactgctcccagacttgattttgatatttggcctgaactctgacccccaatgtaatttgagaggtcaatgccagaattcttcctgtgtccagtaaacagccactgaaacctttgatcttgacatattactttcagtccaaattcagcctgtgaacccaaccacaaatccctatacttgactgttctctgagagcctcaaaccccaatgtaggcctggctgttggagatctatccctctggtcaggcccctctctgtgctgtcatgtcaccaccctgcccttgccatgccttcatcccaaggcctcccgaagccagccatcctcacgcatgagcgggtactgcagatgagcaagatgctgtccttatctggggccacagctgatgatgtggtttacacggtcctgcctctgtaccacgtgatgggacttgtcgttgggatcctcggctgcttagatctcggtaagcccacttctgaggatccctccagtctacaggaccacgggagtaagtgtcggcgtggggctgtcaaggcaaaaagacaccataggttacccagcaccctgtgttctcacttttgagaagggacacccaccaatgactaccagggccgcatggacagaagcttggacacccacacagtccctgatggccatgctttggtcaggaggtgacaagacctgatacgagtgatggtcacaggcatccaaggaaggtgtggtgctcaggagatgatggggatgctggcccagatttgtgacatggccccaagggcagctggagtaggagtgctctcaagcactccacagggctgtctctctggactcttgattcagagtctagatggggacctctccatagcttgttctttttgttttctctcttttttttttattttaatttttatttatttattttttttcgagacagagtcttgctttgtcacccaggctggagtgcagaggcatgatcttggctcactgcaacctctgcctcctgggttcaagcaattctcctgcctcatcctcctgagtaactgggattacaggcgcccaccaccacgcccggctaatttttgtagttttagtagagacgggatttcaccatcttggccaggctggtcttgaactcctgacctcgtgatccacctgccttggcctcccaaagtgctgagattacaggtgtgagccaccgcacctggctattttctctctctctctctttttttttttgagacagagtctcgctctgtcgcccaggctggagtgcggtggcatgatctcggctcactgcaagctccgccttccaggttcaagcgattttcctgcctcagcctcctgagtagctgggattacaggcacgcaccaccacgcccagctaatttttgtatttttactagagactaggtttcaccatgttggtcaggctggtctcaaactcctgaccttgtgatctgcccacatttgcgggcatttgcctcccaaagcgctgggattacaggtgtgacccaccacgcccggcctttttgtgttttccagctattatcatggccatgtgtggttgctcatgcctataatccctgcactttgggtgccaaggcaggaggatcacttgagtccaggagttcaacaccagcgtgggcaacatagtaagaggccatctgttaaaaaaaaattttaaaaagccacgcatggtggtatcgggggaacctgcccctaatatttcaatgtaggttctttttttttttttttttgagatggagtctcgctctgtcgcccaggctggagtgcagtggtgcgatctcagctcactgcaagctctgcctcctgggttcatgccattctcctgcctcagcctccccagtagctgggactacaggcgcctgccaccgcgcccggctaattttttgtatttttagtagagatggggtttcacatttagccaggatggtctcaatctcctgacctcatgatcctcccacctcggcctcccaaagtgctgggattacaggtgtgagccactgtgcccggcctcgatgtaggttctttctattttccgtaagtgctggccagctgagaaataaagagaaagagtacaaagagaggaatttgacagctgggcctccgggggtgacatcacatatcggtaggaccatgatgcccacctgagctcaaagccagcaagttttattaaggatttcagaagggaagggggtgtaagaaccgagaataggtacaaagatcacatgcttcaaagggcaaaaaacggaactactgatcagggtccaacaaagatcacaaggcaaagggcaaaagcagaactgataagggtctatgttcagtggtgcacatattgtcttgataaacatcttaaacaacagaaaacagggttcaagagcagagaactggtctgacctcaaatttaccagggcggggtttttccccaccctagtaagcctgagggtactgcaggagaccagggtgcatctcagtccttatctcaactgcataggacagacattcccagagcggccatttatagacctccccccaggaatgaattcctttcccagggtcttaatgttaatattccttgctaggaaaataatttagcaatatctctcctacttgcacgtccacttataggctctctgcaagaagaaaaatatggctctttttgcccagccccgcaggcagtcagaccttagggttgtcttcccttgttccctaaaatcactctcattctgttctttttcaatgtgcgctgatttcacattgttcaaacacacattttacaatcaatttgtacagttaacacaattatcacagggtcctgaggtgacgtacatcctcagcttatgaagataacaggattaagagatgaaagtaagacaggcgtaagaaattataagagtattatttgggaagtgataaatgtccatgttatcttcacaatttatgttcctctgccgtggctccagccggtccgtctgttaggggtccctgacttcccgcaacagtggtgagcacttgtgagcgattcttctgcctcagcatcccgagtagctgttattacaggtgcccaccactatgcccggctaatttttgaatttttagtataggtggggtctcaccatgttggccaggctggtctccaacacctgacctcatgatccacccacctcagcctcccaaagtgctgggattacaggcatgagccaccgcgcccggccaaatttttcttttttttttaattatgaaaagtttagctgtgcccggtggttcacgcctgtaatcccagcactttgggaggctgaggcgggtggatcacctgaggtcaggagttcaagacaagcctggtcaacatagtgaaatctgtctctacttaaaatacaaaaattagccagtcatggtggctcacgcctgtaatcccagcactttgggaagctgaggccactggatcacctgaaatcaggagtttgagaccagcctggccaacatggtaaaaccctgtctgtactgaaaatacaaaattagctgggcgtggtgatgcgagcctgtgtttccagctactcgggaggctgaggcaggaaaatcgcttcaacctgggaggcgggggttgcaaaaagagtgaaactcccttgcaaaaaaaaaaaaaaagtgaaaatagtttgatgacatctcatgtatcttcgcccagcatcaataattgttaacatgttgccagtttaatttcgcatatacttctctgtttcttttttgtttgtttttgagacacagtctcgctctgtcacccaggctggagtgcagtggcaccatctcagatcaccacaacctctgcctcccgggttcaagcaattctctgctgaggctgagcctcctgagtagctgggattacaggcatgcgcctccacacctggctaatgtttgtattcttagtagagacggggttttgccatgttggccaggctggtctcgaactcctgacctcaggtgatccacctacctcggcctcccaaagtgctgggattacaggcgtgaaccaccgcgcctggcgtctgtttgttttcaaacttttatcatggccaggtgtggttcctcatgcctataatccctgcactttggggtaccaaggcaggaggatcacttgagcccaggagttcaacaccagcctgggcaacatagtgagagtccatctgttaaaaaaaaaaaaaagccaggcatggtggtgagcacttgtgagcgattctcctgcctcagcctccctagtagctgttattacaggctcccaccaccgtgcctggctaacttttgtatttttagtagagacagggtttaaccatgttggccaggctggtctcgaactcctgacctcgtgatccgcccgcctcggcctcccaaagtgctgggattacaggtgtgaactaccgtgcccggccaaatgtttttttttttttttttgagtcggggtttcactattgttgcccaggatggaatgcaatggcgcgatgtcggctcactgcaacctctgcctcctgggttcaagcgattctcctgcctcagcatcccaagtagctgggattacaggcatgtgccctcacgaccggctaatttttttttatgtttttagtagagatggggtttctccatgttggtcaggcttgtctcaaactcccgacctcaggtgatccgcccacctcagcctcgcaaagtgctgggattacaggcgtgagccactgcgcccggccaaattgtttttttaattatgaaaagtttaggctgtgcccagtggtttacgcctgtaatcccagcactttgggaggatgagtctggtggatcacctgaggtcaggagttcaagatcagcctggctaacatggcaaaatccgtctctacctaaaatacaaaaattaccggggcatggtggctcacgcctgtaatcccagcactttgggaggctgaggccggcggaacacctgaagtcaggagtttgagaccagcctggccaacatggtgaaaccctgtctctactgaaaatacaaaattagctgggtatggtggtgggcgcctgtatttccagctaccagggaggctgaggcaggagaatcgcttgaacccggggcgcaggggttgcagtgagccgagatctagccattgcattccagcctgtgcaaaaagcgagactctgtctcaaaaaaaaaaaaaaaaaaaagtgaaaatagtttgatgacatctcaggtatcttcacccagcttcaataattgttaacatgctgccagtttaatttctttttttttttttctttgagatggagtctcgctctgtcgcccaggctggagtgcagtggcgcaatctctgctcacggcaagctccgcctcctgggttcatgccattctcctgcctaagtctccggagtagctgggactacaagtgaccgccaccacgcctggctattttttttgtatttttagtagagacagggtttcacggtgttcaccaggatggtctcaatctcctgacctcgtgatccgcccgcctcggcctcccaaagtgctgggattacaggcatgagccaccgcgcccagggccagtttaatttcacatgtacttccctgtttcttttttgtttgtttgtttgtttttgagacagagtctcgctctgtcgcccaggctggagtgcagtggcaccatcttgggtcaccgcaagctccgccccgcccgccccccccccccccccagggttcaatcagttttctgcctcagcctcctgaatagctgggattacaggcacgcaccgccacaagcggctaatttttgtatttttagtagagacagggtttcgccatgttggccaggctggtctcaaactcctgacctcaggtgatccacctgcctcggcctcccaaagtgctgggattacaggcgtgagccaccgtgcccagccacttccctatttttttccagaatatatcagagcaaatcctagacactgcatctttatgcttgtaaatattgcagtacatatctctaacatataagcactgaagaaactgtaaccaaagtgattattacacgtaacaacattaatatcatatgatgtccttaatatcatatgatgtaaccccttaatatcatatgatgtccagtctatgttcagatttctccaatgggctgttttggtttggttttgtttttagagacagagtcttgctttgtcacccaggctggagtacagttgtgtgatgttggctcactacaacctctgcctcctgggttcaaacgattctcatgcctcatcctcctgagcagttgtgattacaggtgtggaccaccatgcccagctaatttttttgtatttttagtaaagacagggtttcgccctgttggccagtctggtcttgaacttctggcctcaagtgatctgaacacgttggcctcccaaagtgctgagattacaggtgtgagctactgtgcccagccaattggctgtttttttgtttgtttgtttgtttgtttgtttttaacaattaaacagtctccccattgtatttgcttgtaggtctctgttcccctttcatctgcatttcttgttaaattggaaactttaactagaggtgttgttagattcagtttttttctttttcttttgagacagggtctcactctgtcacccaggctggagtgcagtggtgtaagctcggctcactacagcctccccctcctgggttcaagcgattcttccacctcagcctcccgagtagctgggactacaggtgtgcgccaccacgcctggctaatttttgcattttttggtagagatagggtttcaccatgttggctaggctggtctcaaactcctgatctttcaggtgatccacccccctcagcctcccaaagtgttgggataacaggtgtgagccaccacgcccagccccctatatcttattaatccatgtgtccatacgtcaatacaaccatacaaacattcaccaacccacccatctacctactcacctacttcctcactcattcattcattcatccacccacccatctatccatccttacacctatccatctttctctttttctttttttttttttttaagacagagtctcactctgtcgcccaggctggagtgcagtggcgctatctcggctcactgcaagctccgcctcccaggttcacgccattctcctgcctcagcctcccgagtagctgggactacaggcgcccgctaccacgcccagctaattttttgtattttcagtagagacgggtttcaccgtgttagccaggatggtcttgatctcctgacctcgtgatccgcccacctcggcctccctaagtcctgggattacaggcgtgacgatcctcacccagccacctatccatctttctacccccctgcctctgcatgtcactgtccagccatccatctactcactcactactctaactgtccacccatccatctactcactcactactctaactgtccagccatccatctactcactcactactctaactgtccacccatccatctactcactcactactctaactgtccacccatccatctactcactcactactctaactgtccacccatccatctactcactcactactctaactgttcacccatccatcttctcactcactactctgtccacacatccatcttctcactcactactctgtccacccatccatctactcactcactactctaactgtccacccatccatccactcactcactactctaactgttcacccatccatcttctcactcactactgtaactgttcacccatccatctactcactcactactctgttcacccatccatcttctcactcactactctaactgtccacacatccatcttctcactcactactctgtccacccatccatctactcactcactactctaactgtccacccatccatccactcactcactactctaactgttcacccatccatcttctcactcactactctaactgttcacccatccatctactcactcactactctgtcacccatccatctactcactcactactctaactgtccacccatccatctactcactcactactctaactgttcacccatccatctactcactcactactctgtccacccacccatctactcactcactactctaactgtccatccattcatctttccatccatccaccatatccatccacctgcccacccatctgcttagctgggcattcatttatcgtaatcaagagtgatttgagcttcgagtcagtgacaagccaaaataaaaattaaaaatgtggctgggcacagaggctcatgcctgtaatcacagcactttggaggccgaggcgggtggatcacctgaaaggtcaggagttcaagaccagcctggccaacatggtgaaaccccgtctgtacttaaaaaagtacaaaaattagccagctgtggtggcgggtgcttgtaatcccagcaactcagaaagctgaggcaggagaatcgcttgaacccgggagggagaggttgcagtgagcggagattgcaccactgcactccagcctgggcaacagagcgagactccgtctcaaaaataaaaataaaaaatttaatatttacagcccttatttagcattgctcactttataacaggcacggagctttcccggcatcctggagacaggatttgaacccaggcctgcctatgctcttctagtgagagcagtcctggctgggccaaggacacaaagatgaactcagtattgtcctgtatttcagggtgtgggggtgggtgagcacaggtgctaaaagcagcttcttacaacaatttggaagcatgacctgaaaccccctctcctgtcatctcccaggagccacctgtgttctggcccccaagttctctacttcctgcttctgggatgactgtcggcagcatggcgtgacagtgatcctgtatgtgggcgagctcctgcggtacttgtgtaacattccccaggtgaggctctaagattagggctccatggtgaacacccaagtatgaaatcccaggtaaaggtctcaggtaaagattcaggtactgaactcaagtccctcagataatacacctcatgcaagaaccccagataatgagtttcagacaaggcttccaataatggtttctttgatagctgtgctaccttgagcctcagtgtcctcatttggaaaacagggataatagcccctacccctatcatgagaatttccattaaaaattaattaattaaaattaaatttccattaaattaaagttctaggtaactactcttaggtgagaccccagatgaggcctccagtcacctctggtaacgtcccccaggcaaagctctgaggtcgcccctgcaggtaaccctctatttaagactccagtaactactctcatgtaagtaacccaggtagatcccttaggtagaggtcccccatcaccttccaggtaactcccaaggtaaggacccaggataacaccccctctaggtaaaggttccaaggcatgccccaagagcacctcctcctcacccttctggggacattcctgtagcaaccagaggaccggacacatacagtccgcctggcaatgggcaatggactacgggctgatgtgtgggagaccttccagcagcgcttcggtcctattcggatctgggaagtctacggctccacagaaggcaacatgggcttagtcaactatgtggggcgctgcggggccctgggcaagatgagctgcctcctccgagtgagtgtgcgggtacctggtgtgcagctgccctgaggctgagcccacaggacctatgtcaacactccaccctccaccccagatgctgtccccctttgagctggtgcagttcgacatggaggcggcggagcctgtgagggacaatcagggcttctgcatccctgtagggctaggtatgggggttgaggagcctttcctgggtggcaggggtggcgaccctcagtcttctgcttggctggaacgagctgctcaaaagcttgacgttggtgctcactagaggggtctgcagccttcatctggaccctgagccagtggcctgccttaccaccatctggggcctccgcctcagcttctcggctctgtccagctcccctgccttgatctcttgctctgatttactgggtctctgggtgtccatctgatttgttctcttgagctttctgtggaagacggcattccagccattggtcccttgtcctgtaccttctgttagtgtcttctcccagggccttgcaaggtcctggtcatatctattctcactgccatttgtctgtccgtcttccatcccttgttatccttttcctgtttctcatgggctccccataccgccttctctatacttctctctcattttctgtgtcgcttgtcgcagtctctcaaggtctctgaatgtctctctcatctctggatctccctgtctgtgtctttgggtctgtccttggcagggtgctgggtgatgaagagtccaccgttgttgaaaacctccagcagggggcttggctggtgggctccaggggttcttgttcctgctcctaccccaggggagccggggctgctgctgaccaaggtggtaagccagcaacccttcgtgggctaccgcggcccccgagagctgtcggaacggaagctggtgcgcaacgtgcggcaatcgggcgacgtttactacaacaccggggacgtactggccatggaccgcgaaggcttcctctacttccgcgaccgcctcggggacaccttccggtccgaggcagggtttctcggggcggggctggcgcggggccacggacgctttcagatcctagagggagtcaggctgaagaggcgggactttcctgtcgtaagagggcggaacttggagtcaggacttctcacgcgaaggcggggcttctcgattttcgagggggcggggctgactgggcctcctgatccccaaaaggggcggggcgggggcaagaggcggggcctctccttcccgggggcgtggtcacaagcgccggctccctccttgcagatggaagggcgagaacgtgtccacgcacgaggtggagggcgtgttgtcgcaggtggacttcttgcaacaggttaacgtgtatggcgtgtgcgtgccaggtgcggagggttctcattttaaacttccaacagctttgtgggtggaggggtcgttattctgattttacaggtggggaagtgctagggcccagagaggtttagagacttgctggctctcacagccagtgagcagagctgggcgaggctggagggtcagctatgggccctcgagatgggtcagccgagagtgaccagactgctctctaggttgtgagggtaaggtgggcatggctgctgtgcagctagcccccggccagactttcgacggggagaagttgtaccagcacgttcgcgcttggctccctgcctacgctaccccccatttcatccgcatccaggtgagcccagggtggcctggtgggtgggtggaagatcatagccagggggcgggtggatgtcacagtgattggaccatggtcactgccctgcaggacgccatggaggtcaccagcacgttcaaactgatgaagacccggttggtgcgtgagggcttcaatgtggggatcgtggttgaccctctgtttgtactggacaaccgggcccagtccttccggcccctgacggcagaaatgtaccaggctgtgtgtgagggaacctggaggctctgatcacctggccaacccactggggtagggatcaaagccagccacccccaccccaacacactcggtgtccctttcatcctgggcctgtgtgaatcccagcctggccataccctcaacctcagtgggctggaa

SEQ ID NO: 14108 - DNA, 1987 bp, Homo sapiens
actccacagctgctgctcctagggaggagctggtaccatgggtgtcaggcaacagttggccttgctgctgctgctgctgctcctgctctggggcctggggcagccagtgtggccagtcgctgtggccttgaccctgcgctggctcctgggggatcccacatgttgcgtgctacttgggctggccatgttagcacggccctggctcggcccctgggtgccccatgggctgagcctggcagctgcggccctggcactaaccctcctgccagcacggctgcccccaggactacgctggctgccggctgatgtgatcttcttggccaagatcctccacctgggcctgaagatcaggggatgcttgagccggcagccgcctgacacctttgtagatgccttcgagcggcgagcacgagcgcagcctggcagggcactcttggtgtggacggggcctggggccggctcagtcacctttgacctccgggagagcctggaggagatccttcccaagctgcaggctgagaacatccgctgcttctacctcagccatacctcccctacaccaggggtgggggctctgggggctgccctggatgcagcgccctcccacccagtgcctgctgacctgcgtgctgggatcacatggagaagccctgccctcttcatctatacctcggggaccactggcctcccgaagccagccatcctcacgcatgagcgggtactgcagatgagcaagatgctgtccttatctggggccacagctgatgatgtggtttacacggtcctgcctctgtaccacgtgatgggacttgtcgttgggatcctcggctgcttagatctcggagccacctgtgttctggcccccaagttctctacttcctgcttctgggatgactgtcggcagcatggcgtgacagtgatcctgtatgtgggcgagctcctgcggtacttgtgtaacattccccagcaaccagaggaccggacacatacagtccgcctggcaatgggcaatggactacgggctgatgtgtgggagaccttccagcagcgcttcggtcctattcggatctgggaagtctacggctccacagaaggcaacatgggcttagtcaactatgtggggcgctgcggggccctgggcaagatgagctgcctcctccgaatgctgtccccctttgagctggtgcagttcgacatggaggcggcggagcctgtgagggacaatcagggcttctgcatccctgtagggctaggggagccggggctgctgctgaccaaggtggtaagccagcaacccttcgtgggctaccgcggcccccgagagctgtcggaacggaagctggtgcgcaacgtgcggcaatcgggcgacgtttactacaacaccggggacgtactggccatggaccgcgaaggcttcctctacttccgcgaccgcctcggggacaccttccgatggaagggcgagaacgtgtccacgcacgaggtggagggcgtgttgtcgcaggtggacttcttgcaacaggttaacgtgtatggcgtgtgcgtgccaggttgtgagggtaaggtgggcatggctgctgtgcagctagcccccggccagactttcgacggggagaagttgtaccagcacgttcgcgcttggctccctgcctacgctaccccccatttcatccgcatccaggacgccatggaggtcaccagcacgttcaaactgatgaagacccggttggtgcgtgagggcttcaatgtggggatcgtggttgaccctctgtttgtactggacaaccgggcccagtccttccggcccctgacggcagaaatgtaccaggctgtgtgtgagggaacctggaggctctgatcacctggccaacccactggggtagggatcaaagccagccacccccaccccaacacactcggtgtccctttcatcctgggcctgtgtgaatcccagcctggccataccctcaacctcagtgggctggaa

SEQ ID NO: 14109 - DNA, 668 bp, Homo sapiens
gtatggcgtgtgcgtgccaggtgcggagggttctcattttaaacttccaacagctttgtgggtggaggggtcgttattctgattttacaggtggggaagtgctagggcccagagaggtttagagacttgctggctctcacagccagtgagcagagctgggcgaggctggagggtcagctatgggccctcgagatgggtcagccgagagtgaccagactgctctctaggttgtgagggtaaggtgggcatggctgctgtgcagctagcccccggccagactttcgacggggagaagttgtaccagcacgttcgcgcttggctccctgcctacgctaccccccatttcatccgcatccaggtgagcccagggtggcctggtgggtgggtggaagatcatagccagggggcgggtggatgtcacagtgattggaccatggtcactgccctgcaggacgccatggaggtcaccagcacgttcaaactgatgaagacccggttggtgcgtgagggcttcaatgtggggatcgtggttgaccctctgtttgtactggacaaccgggcccagtccttccggcccctgacggcagaaatgtaccaggctgtgtgtgagggaacctggaggctctgatcacctggccaacccactggggtagggatcaaagccagcc

SEQ ID NO: 14110 - DNA, 575 bp, Homo sapiens
gtatggcgtgtgcgtgccaggtgcggagggttctcattttaaacttccaacagctttgtgggtggaggggtcgttattctgattttacaggtggggaagtgctagggcccagagaggtttagagacttgctggctctcacagccagtgagcagagctgggcgaggctggagggtcagctatgggccctcgagatgggtcagccgagagtgaccagactgctctctaggttgtgagggtaaggtgggcatggctgctgtgcagctagcccccggccagactttcgacggggagaagttgtaccagcacgttcgcgcttggctccctgcctacgctaccccccatttcatccgcatccaggacgccatggaggtcaccagcacgttcaaactgatgaagacccggttggtgcgtgagggcttcaatgtggggatcgtggttgaccctctgtttgtactggacaaccgggcccagtccttccggcccctgacggcagaaatgtaccaggctgtgtgtgagggaacctggaggctctgatcacctggccaacccactggggtagggatcaaagccagcc
